(19) United States
(12) Patent Application Publication
(10) Pub. No.: US 2004/0014040 A1
(43) Pub. Date: Jan. 22, 2004

(54) Cardiotoxin molecular toxicology modeling

(76) Inventors: Donna Mendrick, Gaithersburg, MD (US); Mark Porter, Gaithersburg, MD (US); Kory Johnson, Gaithersburg, MD (US); Brandon Higgs, Gaithersburg, MD (US); Arthur Castle, Gaithersburg, MD (US); Michael Elashoff, Gaithersburg, MD (US)

Correspondence Address: MORGAN LEWIS & BOCKIUS LLP, 1111 PENNSYLVANIA AVENUE NW, WASHINGTON, DC, 20004, US

(21) Appl. No.: 10/191,803

(22) Filed: Jul. 10, 2002

Related U.S. Application Data
(60) Provisional application No. 60/303,819, filed on Jul. 10, 2001.
(60) Provisional application No. 60/305,623, filed on Jul. 17, 2001.
(60) Provisional application No. 60/369,351, filed on Apr. 3, 2002.
(60) Provisional application No. 60/377,611, filed on May 6, 2002.

(51) Int. Cl. C12Q 1/68; G06F 19/00; G01N 33/48; G01N 33/50

(52) U.S. Cl. 435/6; 702/20

(57) ABSTRACT

The present invention is based on the elucidation of the global changes in gene expression and the identification of toxicity markers in tissues or cells exposed to a known cardiotoxin. The genes may be used as toxicity markers in drug screening and toxicity assays. The invention includes a database of genes characterized by toxin-induced differential expression that is designed for use with microarrays and other solid-phase probes.

### RELATED APPLICATIONS

[0001] This application claims priority to U.S. Provisional Applications 60/303,819; 60/305,623; 60/369,351; and 60/377,611, all of which are herein incorporated by reference in their entirety. This application is also related to U.S. application Ser. Nos. 09/917,800; 10/060,087; and 10/152,319, all of which are also herein incorporated by reference in their entirety.

### SEQUENCE LISTING SUBMISSION ON COMPACT DISC

[0002] The Sequence Listing submitted concurrently herewith on compact disc is herein incorporated by reference in its entirety. Three copies of the Sequence Listing, one on each of three compact discs are provided. Copy 1 and Copy 2 are identical. Copies 1 and 2 are also identical to the CRF. Each electronic copy of the Sequence Listing was created on Jun. 19, 2002 with a file size of 1523 KB. The file names are as follows: Copy 1-g15090us.txt; Copy 2-g15090us.txt; and CRF-g15090us.txt.

### BACKGROUND OF THE INVENTION

[0003] The need for methods of assessing the toxic impact of a compound, pharmaceutical agent or environmental pollutant on a cell or living organism has led to the development of procedures which utilize living organisms as biological monitors. The simplest and most convenient of these systems utilize unicellular microorganisms such as yeast and bacteria, since they are the most easily maintained and manipulated. In addition, unicellular screening systems often use easily detectable changes in phenotype to monitor the effect of test compounds on the cell. Unicellular organisms, however, are inadequate models for estimating the potential effects of many compounds on complex multicellular animals, as they do not have the ability to carry out biotransformations.

[0004] The biotransformation of chemical compounds by multicellular organisms is a significant factor in determining the overall toxicity of agents to which they are exposed. Accordingly, multicellular screening systems may be preferred or required to detect the toxic effects of compounds. The use of multicellular organisms as toxicology screening tools has been significantly hampered, however, by the lack of convenient screening mechanisms or endpoints, such as those available in yeast or bacterial systems.

### SUMMARY OF THE INVENTION

[0005] The present invention is based, in part, on the elucidation of the global changes in gene expression in tissues or cells exposed to known toxins, in particular cardiotoxins, as compared to unexposed tissues or cells as well as the identification of individual genes that are differentially expressed upon toxin exposure.

[0006] In various aspects, the invention includes methods of predicting at least one toxic effect of a compound, predicting the progression of a toxic effect of a compound, and predicting the cardiotoxicity of a compound. The invention also includes methods of identifying agents that modulate the onset or progression of a toxic response. Also provided are methods of predicting the cellular pathways that a compound modulates in a cell. The invention also includes methods of identifying agents that modulate protein activities.

[0007] In a further aspect, the invention includes probes comprising sequences that specifically hybridize to genes in Tables 1-5I. Also included are solid supports comprising at least two of the previously mentioned probes. The invention also includes a computer system that has a database containing information identifying the expression level in a tissue or cell sample exposed to a cardiotoxin of a set of genes in Tables 1-5I.

### DETAILED DESCRIPTION

[0008] Many biological functions are accomplished by altering the expression of various genes through transcriptional (e.g. through control of initiation, provision of RNA precursors, RNA processing, etc.) and/or translational control. For example, fundamental biological processes such as cell cycle, cell differentiation and cell death, are often characterized by the variations in the expression levels of groups of genes.

[0009] Changes in gene expression are also associated with the effects of various chemicals, drugs, toxins, pharmaceutical agents and pollutants on an organism or cell. Thus, changes in the expression levels of particular genes (e.g. oncogenes or tumor suppressors) may serve as signposts for the presence and progression of toxicity or other cellular responses to exposure to a particular compound.

[0010] Monitoring changes in gene expression may also provide certain advantages during drug screening and development. Often drugs are screened for the ability to interact with a major target without regard to other effects the drugs have on cells. These cellular effects may cause toxicity in the whole animal, which prevents the development and clinical use of the potential drug.

[0011] The present inventors have examined tissue from animals exposed to known cardiotoxins which induce detrimental heart effects, to identify global changes in gene expression and individual changes in gene expression induced by these compounds. These global changes in gene expression, which can be detected by the production of expression profiles (an expression level of one or more genes), provide useful toxicity markers that can be used to monitor toxicity and/or toxicity progression by a test compound. Some of these markers may also be used to monitor or detect various disease or physiological states, disease progression, drug efficacy and drug metabolism.

[0012] Identification of Toxicity Markers

[0013] To evaluate and identify gene expression changes that are predictive of toxicity, studies using selected compounds with well characterized toxicity have been conducted by the present inventors to catalogue altered gene expression during exposure in vivo and in vitro. In the present study, cyclophosphamide, ifosfamide, minoxidil, hydralazine, BI-QT, clenbuterol, isoproterenol, norepinephrine, and epinephrine were selected as known cardiotoxins.

[0014] Cyclophosphamide, an alkylating agent, is highly toxic to dividing cells and is commonly used in chemotherapy to treat non-Hodgkin's lymphomas, Burkitt's lymphoma and carcinomas of the lung, breast, and ovary (Goodman & Gilman's The Pharmacological Basis of Therapeutics 9^{th} ed., p. 1234, 1237-1239, J. G. Hardman et al., Eds., McGraw Hill, New York, 1996). Additionally, cyclophosphamide is used as an immunosuppressive agent in bone marrow transplantation and following organ transplantation. Though cyclophosphamide is therapeutically useful, it is also associated with cardiotoxicity, nephrotoxicity, and hemorrhagic cystitis. Once in the liver, cyclophosphamide is hydroxylated by the cytochrome P450 mixed function oxidase system. The active metabolites, phosphoramide mustard and acrolein, cross-link DNA and cause growth arrest and cell death. Acrolein has been shown to decrease cellular glutathione levels (Dorr and Lagel (1994), Chem Biol Interact 93: 117-128).

[0015] The cardiotoxic effects of cyclophosphamide have been partially elucidated. One study analyzed plasma levels in 19 women with metastatic breast carcinoma who had been treated with cyclophosphamide, thiotepa, and carboplatin (Ayash et al. (1992), J Clin Oncol 10: 995-1000). Of the 19 women in the study, six developed moderate congestive heart failure. In another case study, a 10-year old boy, who had been treated with high-dose cyclophosphamide, developed cardiac arrhythmias and intractable hypotension (Tsai et al. (1990), Am J Pediatr Hematol Oncol 12: 472-476). The boy died 23 days after the transplantation.

[0016] Another clinical study examined the relationship between the amount of cyclophosphamide administered and the development of cardiotoxicity (Goldberg et al. (1986), Blood 68: 1114-1118). When the cyclophosphamide dosage was ≦1.55 g/m²/d, only 1 out of 32 patients had symptoms consistent with cyclophosphamide cardiotoxicity. Yet when the dosage was greater than 1.55 g/m²/d, 13 out of 52 patients were symptomatic. Six of the high-dose patients died of congestive heart failure.

[0017] In a related study, Braverman et al. compared the effects of once daily low-dose administration of cyclophosphamide (87+/−11 mg/kg) and twice-daily high-dose treatment (174+/−34 mg/kg) on bone marrow transplantation patients (Braverman et al. (1991), J Clin Oncol 9: 1215-1223). Within a week, the high-dose patients had an increase in left ventricular mass index. Out of five patients who developed clinical cardiotoxicity, four were in the high-dose group.

[0018] Ifosfamide, an oxazaphosphorine, is an analog of cyclophosphamide. Whereas cyclophosphamide has two chloroethyl groups on the exocyclic nitrogen, ifosfamide contains one chloroethyl group on the ring nitrogen and the other on the exocyclic nitrogen. Ifosfamide is a nitrogen mustard and alkylating agent, commonly used in chemotherapy to treat testicular, cervical, and lung cancer, as well as sarcomas and lymphomas. Like cyclophosphamide, it is activated in the liver by hydroxylation, but it reacts more slowly and produces more dechlorinated metabolites and chloroacetaldehyde. Comparatively higher doses of ifosfamide are required to match the efficacy of cyclophosphamide.

[0019] Alkylating agents can cross-link DNA, resulting in growth arrest and cell death. Despite its therapeutic value, ifosfamide is associated with nephrotoxicity (affecting the proximal and distal renal tubules), urotoxicity, venooclusive disease, myclosuppression, pulmonary fibrosis and central neurotoxicity (Goodman & Gilman's The Pharmacological Basis of Therapeutics 9^{th} ed., p.1234-1240, J. G. Hardman et al., Eds., McGraw Hill, New York, 1996). Ifosfamide can also cause acute severe heart failure and malignant ventricular arrhythmia, which may be reversible. Death from cardiogenic shock has also been reported (Cecil Textbook of Medicine 20^{th} ed., Bennett et al. eds., p. 331, W. B. Saunders Co., Philadelphia, 1996).

[0020] Studies of patients with advanced or resistant lymphomas or carcinomas showed that high-dose ifosfamide treatment produced various symptoms of cardiac disease, including dyspnea, tachycardia, decreased left ventricular contractility and malignant ventricular arrhythmia (Quezado et al. (1993), Ann Intern Med 118: 31-36; Wilson et al. (1992), J Clin Oncol 19: 1712-1722). Other patient studies have noted that ifosfamide-induced cardiac toxicity may be asymptomatic, although it can be detected by electrocardiogram and should be monitored (Pai et al.(2000), Drug Saf 22: 263-302).

[0021] Minoxidil is an antihypertensive medicinal agent used in the treatment of high blood pressure. It works by relaxing blood vessels so that blood may pass through them more easily, thereby lowering blood pressure. By applying minoxidil to the scalp, it has recently been shown to be effective at combating hair loss by stimulating hair growth. Once minoxidil is metabolized by hepatic sulfotransferase, it is converted to the active molecule minoxidil N—O sulfate (Goodman & Gilman's The Pharmacological Basis of Therapeutics 9^{th} ed., pp. 796-797, J. G. Hardman et al., Eds., McGraw Hill, New York, 1996). The active minoxidil sulfate stimulates the ATP-modulated potassium channel consequently causing hyperpolarization and relaxation of smooth muscle. Early studies on minoxidil demonstrated that following a single dose of the drug, patients suffering from left ventricular failure exhibited a slightly increased heart rate, a fall in the mean arterial pressure, a fall in the systemic vascular resistance, and a slight increase in cardiac index (Franciosa and Cohn (1981) Circulation 63: 652-657).

[0022] Some common side effects associated with minoxidil treatment are an increase in hair growth, weight gain, and a fast or irregular heartbeat. More serious side effects are numbness of the hands, feet, or face, chest pain, shortness of breath, and swelling of the feet or lower legs. Because of the risks of fluid retention and reflex cardiovascular effects, minoxidil is often given concomitantly with a diuretic and a sympatholytic drug.

[0023] While minoxidil is effective at lowering blood pressure, it does not lead to a regression of cardiac hypertrophy. To the contrary, minoxidil has been shown to cause cardiac enlargement when administered to normotensive animals (Moravec et al. (1994) J Pharmacol Exp Ther 269: 290-296). Moravec et al. examined normotensive rats that had developed myocardial hypertrophy following treatment with minoxidil. The authors found that minoxidil treatment led to enlargement of the left ventricle, right ventricle, and interventricular septum.

[0024] Another rat study investigated the age- and dose-dependency of minoxidil- induced cardiotoxicity (Herman et al. (1996) Toxicology 110: 71-83). Rats ranging in age from 3 months to 2 years were given varying amounts of minoxidil over the period of two days. The investigators observed interstitial hemorrhages at all dose levels, however the hemorrhages were more frequent and severe in the older animals. The 2 year old rats had vascular lesions composed of arteriolar damage and calcification.

[0025] Hydralazine, an antihypertensive drug, causes relaxation of arteriolar smooth muscle. Such vasodilation is linked to vigorous stimulation of the sympathetic nervous system, which in turn leads to increased heart rate and contractility, increased plasma renin activity, and fluid retention (Goodman & Gilman's The Pharmacological Basis of Therapeutics 9^{th} ed., p. 794, J. G. Hardman et al., Eds., McGraw Hill, New York, 1996). The increased renin activity leads to an increase in angiotensin II, which in turn causes stimulation of aldosterone and sodium reabsorption.

[0026] Hydralazine is used for the treatment of high blood pressure (hypertension) and for the treatment of pregnant women suffering from high blood pressure (pre-eclampsia or eclampsia). Some common side effects associated with hydralazine use are diarrhea, rapid heartbeat, headache, decreased appetite, and nausea. Hydralazine is often used concomitantly with drugs that inhibit sympathetic activity to combat the mild pulmonary hypertension that can be associated with hydralazine usage.

[0027] In one hydralazine study, rats were given one of five cardiotoxic compounds (isoproterenol, hydralazine, caffeine, cyclophosphamide, or adriamycin) by intravenous injection (Kemi et al. (1996), J Vet Med Sci 58: 699-702). At one hour and four hours post-dose, early focal myocardial lesions were observed histopathologically. Lesions were observed in the rats treated with hydralazine four hours post-dose. The lesions were found in the inner one third of the left ventricular walls including the papillary muscles.

[0028] Another study compared the effects of isoproterenol, hydralazine and minoxidil on young and mature rats (Hanton et al. (1991), Res Commun Chem Pathol Pharmacol 71: 231-234). Myocardial necrosis was observed in both age groups, but it was more severe in the mature rats. Hypotension and reflex tachycardia were also seen in the hydralazine-treated rats.

[0029] BI-QT, has been shown to induce QC prolongation in dogs and liver alterations in rats. Over a four week period, dogs treated with BI-QT exhibited sedation, decreased body weight, increased liver weight, and slightly increased levels of AST, ALP, and BUN. After three months of treatment, the dogs exhibited signs of cardiovascular effects.

[0030] Clenbuterol, a β2 adrenergic agonist, can be used therapeutically as a bronchial dilator for asthmatics. It also has powerful muscle anabolic and lipolytic effects. It has been banned in the United States but continues to be used illegally by athletes to increase muscle growth. In a number of studies, rats treated with clenbuterol developed hypertrophy of the heart and latissimus dorsi muscle (Doheny et al. (1998), Amino Acids 15: 13-25; Murphy et al. (1999), Proc Soc Exp Biol Med 221: 184-187; Petrou et al. (1995), Circulation 92: II483-II489).

[0031] In one study, mares treated with therapeutic levels of clenbuterol were compared to mares that were exercised and mares in a control group (Sleeper et al. (2002), Med Sci Sports Exerc 34: 643-650). The clenbuterol-treated mares demonstrated significantly higher left ventricular internal dimension and interventricular septal wall thickness at end diastole. In addition, the clenbuterol-treated mares had significantly increased aortic root dimensions, which could lead to an increased chance of aortic rupture.

[0032] In another study, investigators reported a case of acute clenbuterol toxicity in a human (Hoffman et al. (2001), J Toxicol 39: 339-344). A 28-year old woman had ingested a small quantity of clenbuterol, and the patient developed sustained sinus tachycardia, hypokalemia, hypophosphatemia, and hypomagnesemia.

[0033] Catecholamines are neurotransmitters that are synthesized in the adrenal medulla and in the sympathetic nervous system. Epinephrine, norepinephrine, and isoproterenol are members of the catecholamine sympathomimetic amine family (Casarett & Doull's Toxicology, The Basic Science of Poisons 6^{th} ed., p. 618-619, C. D. Klaassen, Ed., McGraw Hill, New York, 2001). They are chemically similar by having an aromatic portion (catechol) to which is attached an amine, or nitrogen-containing group.

[0034] Isoproterenol, an antiarrhythmic agent, is used therapeutically as a bronchodilator for the treatment of asthma, chronic bronchitis, emphysema, and other lung diseases. Some side effects of usage are myocardial ischemia, arrhythmias, angina, hypertension, and tachycardia. As a β receptor agonist, isoproterenol exerts direct positive inotropic and chronotropic effects. Peripheral vascular resistance is decreased along with the pulse pressure and mean arterial pressure. However, the heart rate increases due to the decrease in the mean arterial pressure.

[0035] Norepinephrine, an α and β receptor agonist, is also known as noradrenaline. It is involved in behaviors such as attention and general arousal, stress, and mood states. By acting on β-1 receptors, it causes increased peripheral vascular resistance, pulse pressure and mean arterial pressure. Reflex bradycardia occurs due to the increase in mean arterial pressure. Some contraindications associated with norepinephrine usage are myocardial ischemia, premature ventricular contractions (PVCs), and ventricular tachycardia.

[0036] Epinephrine, a potent α and β adrenergic agonist, is used for treating bronchoconstriction and hypotension resulting from anaphylaxis as well as all forms of cardiac arrest. Injection of epinephrine leads to an increase in systolic pressure, ventricular contractility, and heart rate. Some side effects associated with epinephrine usage are cardiac arrhythmias, particularly PVCs, ventricular tachycardia, renal vascular ischemia, increased myocardial oxygen requirements, and hypokalemia.

[0037] Toxicity Prediction and Modeling

[0038] The genes and gene expression information, gene expression profiles, as well as the portfolios and subsets of the genes provided in Tables 1-5I, may be used to predict at least one toxic effect, including the cardiotoxicity of a test or unknown compound. As used, herein, at least one toxic effect includes, but is not limited to, a detrimental change in the physiological status of a cell or organism. The response may be, but is not required to be, associated with a particular pathology, such as tissue necrosis, myocarditis, arrhythmias, tachycardia, myocardial ischemia, angina, hypertension, hypotension, dyspnea, and cardiogenic shock. Accordingly, the toxic effect includes effects at the molecular and cellular level. Cardiotoxicity is an effect as used herein and includes but is not limited to the pathologies of tissue necrosis, myocarditis, arrhythmias, tachycardia, myocardial ischemia, angina, hypertension, hypotension, dyspnea, and cardiogenic shock. As used herein, a gene expression profile comprises any representation, quantitative or not, of the expression of at least one mRNA species in a cell sample or population and includes profiles made by various methods such as differential display, PCR, hybridization analysis, etc.

[0039] In general, assays to predict the toxicity or cardiotoxicity of a test agent (or compound or multi-component composition) comprise the steps of exposing a cell population to the test compound, assaying or measuring the level of relative or absolute gene expression of one or more of the genes in Tables 1-5I and comparing the identified expression level(s) to the expression levels disclosed in the Tables and database(s) disclosed herein. Assays may include the measurement of the expression levels of about 2, 3, 4, 5, 6, 7, 8, 9, 10, 15, 20, 25, 30, 50, 75, 100 or more genes from Tables 1-5I.

[0040] In the methods of the invention, the gene expression level for a gene or genes induced by the test agent, compound or compositions may be comparable to the levels found in the Tables or databases disclosed herein if the expression level varies within a factor of about 2, about 1.5 or about 1.0 fold. In some cases, the expression levels are comparable if the agent induces a change in the expression of a gene in the same direction (e.g., up or down) as a reference toxin.

[0041] The cell population that is exposed to the test agent, compound or composition may be exposed in vitro or in vivo. For instance, cultured or freshly isolated heart cells, in particular rat heart cells, may be exposed to the agent under standard laboratory and cell culture conditions. In another assay format, in vivo exposure may be accomplished by administration of the agent to a living animal, for instance a laboratory rat.

[0042] Procedures for designing and conducting toxicity tests in in vitro and in vivo systems are well known, and are described in many texts on the subject, such as Loomis et al., Loomis's Essentials of Toxicology, 4th Ed., Academic Press, New York, 1996; Echobichon, The Basics of Toxicity Testing, CRC Press, Boca Raton, 1992; Frazier, editor, In Vitro Toxicity Testing, Marcel Dekker, New York, 1992; and the like.

[0043] In in vitro toxicity testing, two groups of test organisms are usually employed: One group serves as a control and the other group receives the test compound in a single dose (for acute toxicity tests) or a regimen of doses (for prolonged or chronic toxicity tests). Because, in some cases, the extraction of tissue as called for in the methods of the invention requires sacrificing the test animal, both the control group and the group receiving compound must be large enough to permit removal of animals for sampling tissues, if it is desired to observe the dynamics of gene expression through the duration of an experiment.

[0044] In setting up a toxicity study, extensive guidance is provided in the literature for selecting the appropriate test organism for the compound being tested, route of administration dose ranges, and the like. Water or physiological saline (0.9% NaCl in water) is the solute of choice for the test compound since these solvents permit administration by a variety of routes. When this is not possible because of solubility limitations, vegetable oils such as corn oil or organic solvents such as propylene glycol may be used.

[0045] Regardless of the route of administration, the volume required to administer a given dose is limited by the size of the animal that is used. It is desirable to keep the volume of each dose uniform within and between groups of animals. When rats or mice are used, the volume administered by the oral route generally should not exceed about 0.005 ml per gram of animal. Even when aqueous or physiological saline solutions are used for parenteral injection the volumes that are tolerated are limited, although such solutions are ordinarily thought of as being innocuous. The intravenous LD₅₀ of distilled water in the mouse is approximately 0.044 ml per gram and that of isotonic saline is 0.068 ml per gram of mouse. In some instances, the route of administration to the test animal should be the same as, or as similar as possible to, the route of administration of the compound to man for therapeutic purposes.

[0046] When a compound is to be administered by inhalation, special techniques for generating test atmospheres are necessary. The methods usually involve aerosolization or nebulization of fluids containing the compound. If the agent to be tested is a fluid that has an appreciable vapor pressure, it may be administered by passing air through the solution under controlled temperature conditions. Under these conditions, dose is estimated from the volume of air inhaled per unit time, the temperature of the solution, and the vapor pressure of the agent involved. Gases are metered from reservoirs. When particles of a solution are to be administered, unless the particle size is less than about 2 μm the particles will not reach the terminal alveolar sacs in the lungs. A variety of apparatuses and chambers are available to perform studies for detecting effects of irritant or other toxic endpoints when they are administered by inhalation. The preferred method of administering an agent to animals is via the oral route, either by intubation or by incorporating the agent in the feed.

[0047] When the agent is exposed to cells in vitro or in cell culture, the cell population to be exposed to the agent may be divided into two or more subpopulations, for instance, by dividing the population into two or more identical aliquots. In some preferred embodiments of the methods of the invention, the cells to be exposed to the agent are derived from heart tissue. For instance, cultured or freshly isolated rat heart cells may be used.

[0048] The methods of the invention may be used generally to predict at least one toxic response, and, as described in the Examples, may be used to predict the likelihood that a compound or test agent will induce various specific heart pathologies, such as tissue necrosis, myocarditis, arrhythmias, tachycardia, myocardial ischemia, angina, hypertension, hypotension, dyspnea, cardiogenic shock, or other pathologies associated with at least one of the toxins herein described. The methods of the invention may also be used to determine the similarity of a toxic response to one or more individual compounds. In addition, the methods of the invention may be used to predict or elucidate the potential cellular pathways influenced, induced or modulated by the compound or test agent due to the similarity of the expression profile compared to the profile induced by a known toxin (see Tables 5-5I).

[0049] Diagnostic Uses for the Toxicity Markers

[0050] As described above, the genes and gene expression information or portfolios of the genes with their expression information as provided in Tables 1-5I may be used as diagnostic markers for the prediction or identification of the physiological state of a tissue or cell sample that has been exposed to a compound or to identify or predict the toxic effects of a compound or agent. For instance, a tissue sample such as a sample of peripheral blood cells or some other easily obtainable tissue sample may be assayed by any of the methods described above, and the expression levels from a gene or genes from Tables 5-5I may be compared to the expression levels found in tissues or cells exposed to the toxins described herein. These methods may result in the diagnosis of a physiological state in the cell, may be used to diagnose toxin exposure or may be used to identify the potential toxicity of a compound, for instance a new or unknown compound or agent that the subject has been exposed to. The comparison of expression data, as well as available sequence or other information may be done by researcher or diagnostician or may be done with the aid of a computer and databases as described below.

[0051] In another format, the levels of a gene(s) of Tables 5-5I, its encoded protein(s), or any metabolite produced by the encoded protein may be monitored or detected in a sample, such as a bodily tissue or fluid sample to identify or diagnose a physiological state of an organism. Such samples may include any tissue or fluid sample, including urine, blood and easily obtainable cells such as peripheral lymphocytes.

[0052] Use of the Markers for Monitoring Toxicity Progression

[0053] As described above, the genes and gene expression information provided in Tables 5-5I may also be used as markers for the monitoring of toxicity progression, such as that found after initial exposure to a drug, drug candidate, toxin, pollutant, etc. For instance, a tissue or cell sample may be assayed by any of the methods described above, and the expression levels from a gene or genes from Tables 5-5I may be compared to the expression levels found in tissue or cells exposed to the cardiotoxins described herein. The comparison of the expression data, as well as available sequence or other information may be done by a researcher or diagnostician or may be done with the aid of a computer and databases.

[0054] Use of the Toxicity Markers for Drug Screening

[0055] According to the present invention, the genes identified in Tables 1-5I may be used as markers or drug targets to evaluate the effects of a candidate drug, chemical compound or other agent on a cell or tissue sample. The genes may also be used as drug targets to screen for agents that modulate their expression and/or activity. In various formats, a candidate drug or agent can be screened for the ability to stimulate the transcription or expression of a given marker or markers or to down-regulate or counteract the transcription or expression of a marker or markers. According to the present invention, one can also compare the specificity of a drug's effects by looking at the number of markers which the drug induces and comparing them. More specific drugs will have less transcriptional targets. Similar sets of markers identified for two drugs may indicate a similarity of effects.

[0056] Assays to monitor the expression of a marker or markers as defined in Tables 1-5I may utilize any available means of monitoring for changes in the expression level of the nucleic acids of the invention. As used herein, an agent is said to modulate the expression of a nucleic acid of the invention if it is capable of up- or down-regulating expression of the nucleic acid in a cell.

[0057] In one assay format, gene chips containing probes to one, two or more genes from Tables 1-5I may be used to directly monitor or detect changes in gene expression in the treated or exposed cell. Cell lines, tissues or other samples are first exposed to a test agent and in some instances, a known toxin, and the detected expression levels of one or more, or preferably 2 or more of the genes of Tables 1-5I are compared to the expression levels of those same genes exposed to a known toxin alone. Compounds that modulate the expression patterns of the known toxin(s) would be expected to modulate potential toxic physiological effects in vivo. The genes in Tables 1-5I are particularly appropriate markers in these assays as they are differentially expressed in cells upon exposure to a known cardiotoxin. Tables 1 and 2 disclose those genes that are differentially expressed upon exposure to the named toxins and their corresponding GenBank Accession numbers. Table 3 discloses the human homologues and the corresponding GenBank Accession numbers of the differentially expressed genes of Tables 1 and 2.

[0058] In another format, cell lines that contain reporter gene fusions between the open reading frame and/or the transcriptional regulatory regions of a gene in Tables 1-5I and any assayable fusion partner may be prepared. Numerous assayable fusion partners are known and readily available including the firefly luciferase gene and the gene encoding chloramphenicol acetyltransferase (Alam et al. (1990), Anal Biochem 188: 245-254). Cell lines containing the reporter gene fusions are then exposed to the agent to be tested under appropriate conditions and time. Differential expression of the reporter gene between samples exposed to the agent and control samples identifies agents which modulate the expression of the nucleic acid.

[0059] Additional assay formats may be used to monitor the ability of the agent to modulate the expression of a gene identified in Tables 5-5I. For instance, as described above, mRNA expression may be monitored directly by hybridization of probes to the nucleic acids of the invention. Cell lines are exposed to the agent to be tested under appropriate conditions and time, and total RNA or mRNA is isolated by standard procedures such those disclosed in Sambrook et al. (Molecular Cloning: A Laboratory Manual, 2nd Ed., Cold Spring Harbor Laboratory Press, Cold Spring Harbor, N.Y., 1989).

[0060] In another assay format, cells or cell lines are first identified which express the gene products of the invention physiologically. Cells and/or cell lines so identified would be expected to comprise the necessary cellular machinery such that the fidelity of modulation of the transcriptional apparatus is maintained with regard to exogenous contact of agent with appropriate surface transduction mechanisms and/or the cytosolic cascades. Further, such cells or cell lines may be transduced or transfected with an expression vehicle (e.g., a plasmid or viral vector) construct comprising an operable non-translated 5′-promoter containing end of the structural gene encoding the gene products of Tables 1-5I fused to one or more antigenic fragments or other detectable markers, which are peculiar to the instant gene products, wherein said fragments are under the transcriptional control of said promoter and are expressed as polypeptides whose molecular weight can be distinguished from the naturally occurring polypeptides or may further comprise an immunologically distinct or other detectable tag. Such a process is well known in the art (see Sambrook et al., supra).

[0061] Cells or cell lines transduced or transfected as outlined above are then contacted with agents under appropriate conditions; for example, the agent comprises a pharmaceutically acceptable excipient and is contacted with cells comprised in an aqueous physiological buffer such as phosphate buffered saline (PBS) at physiological pH, Eagles balanced salt solution (BSS) at physiological pH, PBS or BSS comprising serum or conditioned media comprising PBS or BSS and/or serum incubated at 37° C. Said conditions may be modulated as deemed necessary by one of skill in the art. Subsequent to contacting the cells with the agent, said cells are disrupted and the polypeptides of the lysate are fractionated such that a polypeptide fraction is pooled and contacted with an antibody to be further processed by immunological assay (e.g., ELISA, immunoprecipitation or Western blot). The pool of proteins isolated from the agent-contacted sample is then compared with the control samples (no exposure and exposure to a known toxin) where only the excipient is contacted with the cells and an increase or decrease in the immunologically generated signal from the agent-contacted sample compared to the control is used to distinguish the effectiveness and/or toxic effects of the agent.

[0062] Use of Toxicity Markers to Identify Agents that Modulate Protein Activity or Levels

[0063] Another embodiment of the present invention provides methods for identifying agents that modulate at least one activity of a protein(s) encoded by the genes in Tables 1-5I. Such methods or assays may utilize any means of monitoring or detecting the desired activity.

[0064] In one format, the relative amounts of a protein (Tables 1-5I) between a cell population that has been exposed to the agent to be tested compared to an unexposed control cell population and a cell population exposed to a known toxin may be assayed. In this format, probes such as specific antibodies are used to monitor the differential expression of the protein in the different cell populations. Cell lines or populations are exposed to the agent to be tested under appropriate conditions and time. Cellular lysates may be prepared from the exposed cell line or population and a control, unexposed cell line or population. The cellular lysates are then analyzed with the probe, such as a specific antibody.

[0065] Agents that are assayed in the above methods can be randomly selected or rationally selected or designed. As used herein, an agent is said to be randomly selected when the agent is chosen randomly without considering the specific sequences involved in the association of a protein of the invention alone or with its associated substrates, binding partners, etc. An example of randomly selected agents is the use a chemical library or a peptide combinatorial library, or a growth broth of an organism.

[0066] As used herein, an agent is said to be rationally selected or designed when the agent is chosen on a nonrandom basis which takes into account the sequence of the target site and/or its conformation in connection with the agent's action. Agents can be rationally selected or rationally designed by utilizing the peptide sequences that make up these sites. For example, a rationally selected peptide agent can be a peptide whose amino acid sequence is identical to or a derivative of any functional consensus site.

[0067] The agents of the present invention can be, as examples, peptides, small molecules, vitamin derivatives, as well as carbohydrates. Dominant negative proteins, DNAs encoding these proteins, antibodies to these proteins, peptide fragments of these proteins or mimics of these proteins may be introduced into cells to affect function. “Mimic” used herein refers to the modification of a region or several regions of a peptide molecule to provide a structure chemically different from the parent peptide but topographically and functionally similar to the parent peptide (see G. A. Grant in: Molecular Biology and Biotechnology, Meyers, ed., pp. 659-664, VCH Publishers, New York, 1995). A skilled artisan can readily recognize that there is no limit as to the structural nature of the agents of the present invention.

[0068] Nucleic Acid Assay Formats

[0069] As previously discussed, the genes identified as being differentially expressed upon exposure to a known cardiotoxin (Tables 1-5I) may be used in a variety of nucleic acid detection assays to detect or quantify the expression level of a gene or multiple genes in a given sample. The genes described in Tables 1-5I may also be used in combination with one or more additional genes whose differential expression is associate with toxicity in a cell or tissue. In preferred embodiments, the genes in Tables 5-5I may be combined with one or more of the genes described in prior and related applications 60/303,819; 60/305,623; 60/369,351; 60/377,611; 09/917,800; 10/060,087; and 10/152,319, all of which are incorporated by reference on page 1 of this application.

[0070] Any assay format to detect gene expression may be used. For example, traditional Northern blotting, dot or slot blot, nuclease protection, primer directed amplification, RT- PCR, semi- or quantitative PCR, branched-chain DNA and differential display methods may be used for detecting gene expression levels. Those methods are useful for some embodiments of the invention. In cases where smaller numbers of genes are detected, amplification based assays may be most efficient. Methods and assays of the invention, however, may be most efficiently designed with hybridization-based methods for detecting the expression of a large number of genes.

[0071] Any hybridization assay format may be used, including solution-based and solid support-based assay formats. Solid supports containing oligonucleotide probes for differentially expressed genes of the invention can be filters, polyvinyl chloride dishes, particles, beads, microparticles or silicon or glass based chips, etc. Such chips, wafers and hybridization methods are widely available, for example, those disclosed by Beattie (WO 95/11755).

[0072] Any solid surface to which oligonucleotides can be bound, either directly or indirectly, either covalently or non-covalently, can be used. A preferred solid support is a high density array or DNA chip. These contain a particular oligonucleotide probe in a predetermined location on the array. Each predetermined location may contain more than one molecule of the probe, but each molecule within the predetermined location has an identical sequence. Such predetermined locations are termed features. There may be, for example, from 2, 10, 100, 1000 to 10,000, 100,000, 400,000 or 1,000,000 or more of such features on a single solid support. The solid support, or the area within which the probes are attached may be on the order of about a square centimeter. Probes corresponding to the genes of Tables 5-5I or from the related applications described above may be attached to single or multiple solid support structures, e.g., the probes may be attached to a single chip or to multiple chips to comprise a chip set.

[0073] Oligonucleotide probe arrays for expression monitoring can be made and used according to any techniques known in the art (see for example, Lockhart et al. (1996), Nat Biotechnol 14: 1675-1680; McGall et al. (1996), Proc Nat Acad Sci USA 93: 13555-13460). Such probe arrays may contain at least two or more oligonucleotides that are complementary to or hybridize to two or more of the genes described in Tables 5-5I. For instance, such arrays may contain oligonucleotides that are complementary to or hybridize to at least 2, 3, 4, 5, 6, 7, 8, 9, 10, 20, 30, 50, 70, 100 or more of the genes described herein. Preferred arrays contain all or nearly all of the genes listed in Tables 1-5I, or individually, the gene sets of Tables 5-5I. In a preferred embodiment, arrays are constructed that contain oligonucleotides to detect all or nearly all of the genes in any one of or all of Tables 1-5I on a single solid support substrate, such as a chip.

[0074] The sequences of the expression marker genes of Tables 1-5I are in the public databases. Table 1 provides the GenBank Accession Number or NCBI RefSeq ID for each of the sequences (see www.ncbi.nlm.nih.gov/) as well as a corresponding SEQ ID NO. in the sequence listing filed with this application. Table 3 provides the LocusLink and Unigene names and descriptions for the human homologues of the genes described in Tables 1 and 2. The sequences of the genes in GenBank and/or RefSeq are expressly herein incorporated by reference in their entirety as of the filing date of this application, as are related sequences, for instance, sequences from the same gene of different lengths, variant sequences, polymorphic sequences, genomic sequences of the genes and related sequences from different species, including the human counterparts, where appropriate. These sequences may be used in the methods of the invention or may be used to produce the probes and arrays of the invention. In some embodiments, the genes in Tables 1-5I that correspond to the genes or fragments previously associated with a toxic response may be excluded from the Tables.

[0075] As described above, in addition to the sequences of the GenBank Accession Numbers or NCBI RefSeq ID's disclosed in the Tables 1-5I, sequences such as naturally occurring variants or polymorphic sequences may be used in the methods and compositions of the invention. For instance, expression levels of various allelic or homologous forms of a gene disclosed in Tables 1-5I may be assayed. Any and all nucleotide variations that do not significantly alter the functional activity of a gene listed in the Tables 1-5I, including all naturally occurring allelic variants of the genes herein disclosed, may be used in the methods and to make the compositions (e.g., arrays) of the invention.

[0076] Probes based on the sequences of the genes described above may be prepared by any commonly available method. Oligonucleotide probes for screening or assaying a tissue or cell sample are preferably of sufficient length to specifically hybridize only to appropriate, complementary genes or transcripts. Typically the oligonucleotide probes will be at least about 10, 12, 14, 16, 18, 20 or 25 nucleotides in length. In some cases, longer probes of at least 30, 40, or 50 nucleotides will be desirable.

[0077] As used herein, oligonucleotide sequences that are complementary to one or more of the genes described in Tables 1-5I refer to oligonucleotides that are capable of hybridizing under stringent conditions to at least part of the nucleotide sequences of said genes, their encoded RNA or mRNA, or amplified versions of the RNA such as cRNA. Such hybridizable oligonucleotides will typically exhibit at least about 75% sequence identity at the nucleotide level to said genes, preferably about 80% or 85% sequence identity or more preferably about 90% or 95% or more sequence identity to said genes.

[0078] “Bind(s) substantially” refers to complementary hybridization between a probe nucleic acid and a target nucleic acid and embraces minor mismatches that can be accommodated by reducing the stringency of the hybridization media to achieve the desired detection of the target polynucleotide sequence.

[0079] The terms “background” or “background signal intensity” refer to hybridization signals resulting from non-specific binding, or other interactions, between the labeled target nucleic acids and components of the oligonucleotide array (e.g., the oligonucleotide probes, control probes, the array substrate, etc.). Background signals may also be produced by intrinsic fluorescence of the array components themselves. A single background signal can be calculated for the entire array, or a different background signal may be calculated for each target nucleic acid. In a preferred embodiment, background is calculated as the average hybridization signal intensity for the lowest 5% to 10% of the probes in the array, or, where a different background signal is calculated for each target gene, for the lowest 5% to 10% of the probes for each gene. Of course, one of skill in the art will appreciate that where the probes to a particular gene hybridize well and thus appear to be specifically binding to a target sequence, they should not be used in a background signal calculation. Alternatively, background may be calculated as the average hybridization signal intensity produced by hybridization to probes that are not complementary to any sequence found in the sample (e.g. probes directed to nucleic acids of the opposite sense or to genes not found in the sample such as bacterial genes where the sample is mammalian nucleic acids). Background can also be calculated as the average signal intensity produced by regions of the array that lack any probes at all.

[0080] The phrase “hybridizing specifically to” or “specifically hybridizes” refers to the binding, duplexing, or hybridizing of a molecule substantially to or only to a particular nucleotide sequence or sequences under stringent conditions when that sequence is present in a complex mixture (e.g., total cellular) DNA or RNA.

[0081] Assays and methods of the invention may utilize available formats to simultaneously screen at least about 100, preferably about 1000, more preferably about 10,000 and most preferably about 1,000,000 different nucleic acid hybridizations.

[0082] As used herein a “probe” is defined as a nucleic acid, capable of binding to a target nucleic acid of complementary sequence through one or more types of chemical bonds, usually through complementary base pairing, usually through hydrogen bond formation. As used herein, a probe may include natural (i.e., A, G, U, C, or T) or modified bases (7-deazaguanosine, inosine, etc.). In addition, the bases in probes may be joined by a linkage other than a phosphodiester bond, so long as it does not interfere with hybridization. Thus, probes may be peptide nucleic acids in which the constituent bases are joined by peptide bonds rather than phosphodiester linkages.

[0083] The term “perfect match probe” refers to a probe that has a sequence that is perfectly complementary to a particular target sequence. The test probe is typically perfectly complementary to a portion (subsequence) of the target sequence. The perfect match (PM) probe can be a “test probe”, a “normalization control” probe, an expression level control probe and the like. A perfect match control or perfect match probe is, however, distinguished from a “mismatch control” or “mismatch probe.”

[0084] The terms “mismatch control” or “mismatch probe” refer to a probe whose sequence is deliberately selected not to be perfectly complementary to a particular target sequence. For each mismatch (MM) control in a high-density array there typically exists a corresponding perfect match (PM) probe that is perfectly complementary to the same particular target sequence. The mismatch may comprise one or more bases.

[0085] While the mismatch(es) may be located anywhere in the mismatch probe, terminal mismatches are less desirable as a terminal mismatch is less likely to prevent hybridization of the target sequence. In a particularly preferred embodiment, the mismatch is located at or near the center of the probe such that the mismatch is most likely to destabilize the duplex with the target sequence under the test hybridization conditions.

[0086] The term “stringent conditions” refers to conditions under which a probe will hybridize to its target subsequence, but with only insubstantial hybridization to other sequences or to other sequences such that the difference may be identified. Stringent conditions are sequence-dependent and will be different in different circumstances. Longer sequences hybridize specifically at higher temperatures. Generally, stringent conditions are selected to be about 5° C. lower than the thermal melting point (Tm) for the specific sequence at a defined ionic strength and pH.

[0087] Typically, stringent conditions will be those in which the salt concentration is at least about 0.01 to 1.0 M Na⁺ ion concentration (or other salts) at pH 7.0 to 8.3 and the temperature is at least about 30° C. for short probes (e.g., 10 to 50 nucleotides). Stringent conditions may also be achieved with the addition of destabilizing agents such as formamide.

[0088] The “percentage of sequence identity” or “sequence identity” is determined by comparing two optimally aligned sequences or subsequences over a comparison window or span, wherein the portion of the polynucleotide sequence in the comparison window may optionally comprise additions or deletions (i.e., gaps) as compared to the reference sequence (which does not comprise additions or deletions) for optimal alignment of the two sequences. The percentage is calculated by determining the number of positions at which the identical submit (e.g. nucleic acid base or amino acid residue) occurs in both sequences to yield the number of matched positions, dividing the number of matched positions by the total number of positions in the window of comparison and multiplying the result by 100 to yield the percentage of sequence identity. Percentage sequence identity when calculated using the programs GAP or BESTFIT (see below) is calculated using default gap weights.

[0089] Probe Design

[0090] One of skill in the art will appreciate that an enormous number of array designs are suitable for the practice of this invention. The high density array will typically include a number of test probes that specifically hybridize to the sequences of interest. Probes may be produced from any region of the genes identified in the Tables and the attached representative sequence listing. In instances where the gene reference in the Tables is an EST, probes may be designed from that sequence or from other regions of the corresponding full-length transcript that may be available in any of the sequence databases, such as those herein described. See WO 99/32660 for methods of producing probes for a given gene or genes. In addition, any available software may be used to produce specific probe sequences, including, for instance, software available from Molecular Biology Insights, Olympus Optical Co. and Biosoft International. In a preferred embodiment, the array will also include one or more control probes.

[0091] High density array chips of the invention include “test probes.” Test probes may be oligonucleotides that range from about 5 to about 500, or about 7 to about 50 nucleotides, more preferably from about 10 to about 40 nucleotides and most preferably from about 15 to about 35 nucleotides in length. In other particularly preferred embodiments, the probes are 20 or 25 nucleotides in length. In another preferred embodiment, test probes are double or single strand DNA sequences such as cDNA fragments. DNA sequences are isolated or cloned from natural sources or amplified from natural sources using native nucleic acid as templates. These probes have sequences complementary to particular subsequences of the genes whose expression they are designed to detect. Thus, the test probes are capable of specifically hybridizing to the target nucleic acid they are to detect.

[0092] In addition to test probes that bind the target nucleic acid(s) of interest, the high density array can contain a number of control probes. The control probes may fall into three categories referred to herein as 1) normalization controls; 2) expression level controls; and 3) mismatch controls.

[0093] Normalization controls are oligonucleotide or other nucleic acid probes that are complementary to labeled reference oligonucleotides or other nucleic acid sequences that are added to the nucleic acid sample to be screened. The signals obtained from the normalization controls after hybridization provide a control for variations in hybridization conditions, label intensity, “reading” efficiency and other factors that may cause the signal of a perfect hybridization to vary between arrays. In a preferred embodiment, signals (e.g., fluorescence intensity) read from all other probes in the array are divided by the signal (e.g., fluorescence intensity) from the control probes thereby normalizing the measurements.

[0094] Virtually any probe may serve as a normalization control. However, it is recognized that hybridization efficiency varies with base composition and probe length. Preferred normalization probes are selected to reflect the average length of the other probes present in the array, however, they can be selected to cover a range of lengths. The normalization control(s) can also be selected to reflect the (average) base composition of the other probes in the array, however in a preferred embodiment, only one or a few probes are used and they are selected such that they hybridize well (i.e., no secondary structure) and do not match any target-specific probes.

[0095] Expression level controls are probes that hybridize specifically with constitutively expressed genes in the biological sample. Virtually any constitutively expressed gene provides a suitable target for expression level controls. Typically expression level control probes have sequences complementary to subsequences of constitutively expressed “housekeeping genes” including, but not limited to the actin gene, the transferrin receptor gene, the GAPDH gene, and the like.

[0096] Mismatch controls may also be provided for the probes to the target genes, for expression level controls or for normalization controls. Mismatch controls are oligonucleotide probes or other nucleic acid probes identical to their corresponding test or control probes except for the presence of one or more mismatched bases. A mismatched base is a base selected so that it is not complementary to the corresponding base in the target sequence to which the probe would otherwise specifically hybridize. One or more mismatches are selected such that under appropriate hybridization conditions (e.g., stringent conditions) the test or control probe would be expected to hybridize with its target sequence, but the mismatch probe would not hybridize (or would hybridize to a significantly lesser extent). Preferred mismatch probes contain a central mismatch. Thus, for example, where a probe is a 20 mer, a corresponding mismatch probe will have the identical sequence except for a single base mismatch (e.g., substituting a G, a C or a T for an A) at any of positions 6 through 14 (the central mismatch).

[0097] Mismatch probes thus provide a control for non-specific binding or cross hybridization to a nucleic acid in the sample other than the target to which the probe is directed. For example, if the target is present the perfect match probes should be consistently brighter than the mismatch probes. In addition, if all central mismatches are present, the mismatch probes can be used to detect a mutation, for instance, a mutation of a gene in the accompanying Tables 1-5I. The difference in intensity between the perfect match and the mismatch probe provides a good measure of the concentration of the hybridized material.

[0098] Nucleic Acid Samples

[0099] Cell or tissue samples may be exposed to the test agent in vitro or in vivo. When cultured cells or tissues are used, appropriate mammalian cell extracts, such as liver cell extracts, may also be added with the test agent to evaluate agents that may require biotransformation to exhibit toxicity.

[0100] The genes which are assayed according to the present invention are typically in the form of mRNA or reverse transcribed mRNA. The genes may or may not be cloned. The genes may or may not be amplified and cRNA produced. The cloning and/or amplification do not appear to bias the representation of genes within a population. In some assays, it may be preferable, however, to use polyA+ RNA as a source, as it can be used with less processing steps.

[0101] As is apparent to one of ordinary skill in the art, nucleic acid samples used in the methods and assays of the invention may be prepared by any available method or process. Methods of isolating total mRNA are well known to those of skill in the art. For example, methods of isolation and purification of nucleic acids are described in detail in Chapter 3 of Laboratory Techniques in Biochemistry and Molecular Biology, Vol. 24, Hybridization With Nucleic Acid Probes: Theory and Nucleic Acid Probes, P. Tijssen, Ed., Elsevier Press, New York, 1993. Such samples include RNA samples, but also include cDNA synthesized from a mRNA sample isolated from a cell or tissue of interest. Such samples also include DNA amplified from the cDNA, and RNA transcribed from the amplified DNA (cRNA). One of skill in the art would appreciate that it is desirable to inhibit or destroy RNase present in homogenates before homogenates are used.

[0102] Biological samples may be of any biological tissue or fluid or cells from any organism as well as cells raised in vitro, such as cell lines and tissue culture cells. Frequently the sample will be a tissue or cell sample that has been exposed to a compound, agent, drug, pharmaceutical composition, potential environmental pollutant or other composition. In some formats, the sample will be a “clinical sample” which is a sample derived from a patient. Typical clinical samples include, but are not limited to, sputum, blood, blood-cells (e.g., white cells), tissue or fine needle biopsy samples, urine, peritoneal fluid, and pleural fluid, or cells therefrom. Biological samples may also include sections of tissues, such as frozen sections or formalin fixed sections taken for histological purposes.

[0103] Forming High Density Arrays

[0104] Methods of forming high density arrays of oligonucleotides with a minimal number of synthetic steps are known. The oligonucleotide analogue array can be synthesized on a single or on multiple solid substrates by a variety of methods, including, but not limited to, light-directed chemical coupling, and mechanically directed coupling (see Pirrung, U.S. Pat. No. 5,143,854).

[0105] In brief, the light-directed combinatorial synthesis of oligonucleotide arrays on a glass surface proceeds using automated phosphoramidite chemistry and chip masking techniques. In one specific implementation, a glass surface is derivatized with a silane reagent containing a functional group, e.g., a hydroxyl or amine group blocked by a photolabile protecting group. Photolysis through a photolithographic mask is used selectively to expose functional groups which are then ready to react with incoming 5′ photoprotected nucleoside phosphoramidites. The phosphoramidites react only with those sites which are illuminated (and thus exposed by removal of the photolabile blocking group). Thus, the phosphoramidites only add to those areas selectively exposed from the preceding step. These steps are repeated until the desired array of sequences have been synthesized on the solid surface. Combinatorial synthesis of different oligonucleotide analogues at different locations on the array is determined by the pattern of illumination during synthesis and the order of addition of coupling reagents.

[0106] In addition to the foregoing, additional methods which can be used to generate an array of oligonucleotides on a single substrate are described in PCT Publication Nos. WO 93/09668 and WO 01/23614. High density nucleic acid arrays can also be fabricated by depositing pre-made or natural nucleic acids in predetermined positions. Synthesized or natural nucleic acids are deposited on specific locations of a substrate by light directed targeting and oligonucleotide directed targeting. Another embodiment uses a dispenser that moves from region to region to deposit nucleic acids in specific spots.

[0107] Hybridization

[0108] Nucleic acid hybridization simply involves contacting a probe and target nucleic acid under conditions where the probe and its complementary target can form stable hybrid duplexes through complementary base pairing. See WO 99/32660. The nucleic acids that do not form hybrid duplexes are then washed away leaving the hybridized nucleic acids to be detected, typically through detection of an attached detectable label. It is generally recognized that nucleic acids are denatured by increasing the temperature or decreasing the salt concentration of the buffer containing the nucleic acids. Under low stringency conditions (e.g., low temperature and/or high salt) hybrid duplexes (e.g., DNA:DNA, RNA:RNA, or RNA:DNA) will form even where the annealed sequences are not perfectly complementary. Thus, specificity of hybridization is reduced at lower stringency. Conversely, at higher stringency (e.g., higher temperature or lower salt) successful hybridization tolerates fewer mismatches. One of skill in the art will appreciate that hybridization conditions may be selected to provide any degree of stringency.

[0109] In a preferred embodiment, hybridization is performed at low stringency, in this case in 6×SSPET at 37° C. (0.005% Triton X-100), to ensure hybridization and then subsequent washes are performed at higher stringency (e.g., 1×SSPET at 37° C.) to eliminate mismatched hybrid duplexes. Successive washes may be performed at increasingly higher stringency (e.g., down to as low as 0.25×SSPET at 37° C. to 50° C.) until a desired level of hybridization specificity is obtained. Stringency can also be increased by addition of agents such as formamide. Hybridization specificity may be evaluated by comparison of hybridization to the test probes with hybridization to the various controls that can be present (e.g., expression level control, normalization control, mismatch controls, etc.).

[0110] In general, there is a tradeoff between hybridization specificity (stringency) and signal intensity. Thus, in a preferred embodiment, the wash is performed at the highest stringency that produces consistent results and that provides a signal intensity greater than approximately 10% of the background intensity. Thus, in a preferred embodiment, the hybridized array may be washed at successively higher stringency solutions and read between each wash. Analysis of the data sets thus produced will reveal a wash stringency above which the hybridization pattern is not appreciably altered and which provides adequate signal for the particular oligonucleotide probes of interest.

[0111] Signal Detection

[0112] The hybridized nucleic acids are typically detected by detecting one or more labels attached to the sample nucleic acids. The labels may be incorporated by any of a number of means well known to those of skill in the art. See WO 99/32660.

[0113] Databases

[0114] The present invention includes relational databases containing sequence information, for instance, for the genes of Tables 1-5I, as well as gene expression information from tissue or cells exposed to various standard toxins, such as those herein described (see Tables 5-5I). Databases may also contain information associated with a given sequence or tissue sample such as descriptive information about the gene associated with the sequence information (see Tables 1 and 2), or descriptive information concerning the clinical status of the tissue sample, or the animal from which the sample was derived. The database may be designed to include different parts, for instance a sequence database and a gene expression database. Methods for the configuration and construction of such databases and computer-readable media to which such databases are saved are widely available, for instance, see U.S. Pat. No. 5,953,727, which is herein incorporated by reference in its entirety.

[0115] The databases of the invention may be linked to an outside or external database such as GenBank (www.ncbi.nlm.nih.gov/entrez.index.html); KEGG (www.genome.ad.jp/kegg); SPAD (www.grt.kyushu-u.acjp/spad/index.html); HUGO (www.gene.ucl.ac.uk/hugo); Swiss-Prot (www.expasy.ch.sprot); Prosite (www.expasy.ch/tools/scnpsitl.html); OMIM (www.ncbi.nlm.nih.gov/omim); and GDB (www.gdb.org). In a preferred embodiment, as described in Tables 1-5I, the external database is GenBank and the associated databases maintained by the National Center for Biotechnology Information (NCBI) (www.ncbi.nlm.nih.gov).

[0116] Any appropriate computer platform, user interface, etc. may be used to perform the necessary comparisons between sequence information, gene expression information and any other information in the database or information provided as an input. For example, a large number of computer workstations are available from a variety of manufacturers, such has those available from Silicon Graphics. Client/server environments, database servers and networks are also widely available and appropriate platforms for the databases of the invention.

[0117] The databases of the invention may be used to produce, among other things, electronic Northerns that allow the user to determine the cell type or tissue in which a given gene is expressed and to allow determination of the abundance or expression level of a given gene in a particular tissue or cell.

[0118] The databases of the invention may also be used to present information identifying the expression level in a tissue or cell of a set of genes comprising one or more of the genes in Tables 5-5I, comprising the step of comparing the expression level of at least one gene in Tables 5-5I in a cell or tissue exposed to a test agent to the level of expression of the gene in the database. Such methods may be used to predict the toxic potential of a given compound by comparing the level of expression of a gene or genes in Tables 5-5I from a tissue or cell sample exposed to the test agent to the expression levels found in a control tissue or cell samples exposed to a standard toxin or cardiotoxin such as those herein described. Such methods may also be used in the drug or agent screening assays as described herein.

[0119] Kits

[0120] The invention further includes kits combining, in different combinations, high- density oligonucleotide arrays, reagents for use with the arrays, protein reagents encoded by the genes of the Tables, signal detection and array-processing instruments, gene expression databases and analysis and database management software described above. The kits may be used, for example, to predict or model the toxic response of a test compound, to monitor the progression of heart disease states, to identify genes that show promise as new drug targets and to screen known and newly designed drugs as discussed above.

[0121] The databases packaged with the kits are a compilation of expression patterns from human or laboratory animal genes and gene fragments (corresponding to the genes of Tables 1-5I). In particular, the database software and packaged information that may contain the databases saved to a computer-readable medium include the expression results of Tables 1-5I that can be used to predict toxicity of a test agent by comparing the expression levels of the genes of Tables 1-5I induced by the test agent to the expression levels presented in Tables 5-5I. In another format, database and software information may be provided in a remote electronic format, such as a website, the address of which may be packaged in the kit.

[0122] Databases and software designed for use with microarrays is discussed in PCT/US99/20449, filed Sep. 8, 1999, Genomic Knowledge Discovery, PCT/IB00/00863, filed Jun. 28, 2000, Biological Data Processing, and in Balaban et al., U.S. Pat. No. 6,229,911, a computer-implemented method for managing information, stored as indexed tables, collected from small or large numbers of microarrays, and U.S. Pat. No. 6,185,561, a computer-based method with data mining capability for collecting gene expression level data, adding additional attributes and reformatting the data to produce answers to various queries. Chee et al., U.S. Pat. No. 5,974,164, disclose a software-based method for identifying mutations in a nucleic acid sequence based on differences in probe fluorescence intensities between wild type and mutant sequences that hybridize to reference sequences.

[0123] The kits may used in the pharmaceutical industry, where the need for early drug testing is strong due to the high costs associated with drug development, but where bioinformatics, in particular gene expression informatics, is still lacking. These kits will reduce the costs, time and risks associated with traditional new drug screening using cell cultures and laboratory animals. The results of large-scale drug screening of pre-grouped patient populations, pharmacogenomics testing, can also be applied to select drugs with greater efficacy and fewer side-effects. The kits may also be used by smaller biotechnology companies and research institutes who do not have the facilities for performing such large-scale testing themselves.

[0124] Without further description, it is believed that one of ordinary skill in the art can, using the preceding description and the following illustrative examples, make and utilize the compounds of the present invention and practice the claimed methods. The following working examples therefore, specifically point out the preferred embodiments of the present invention, and are not to be construed as limiting in any way the remainder of the disclosure.

### EXAMPLES

### Example 1

### Identification of Toxicity Markers

[0125] The cardiotoxins cyclophosphamide, ifosfamide, minoxidil, hydralazine, BI-QT, clenbuterol, isoproterenol, norepinephrine, and epinephrine and control compositions were administered to male Sprague-Dawley rats at various timepoints using administration diluents, protocols and dosing regimes as previously described in the art and previously described in the priority applications discussed above. The low and high dose level for each compound are provided in the chart below.

| Heart Toxin | Low Dose (mg/kg) | High Dose (mg/kg) |
|---|---|---|
| cyclophosphamide | 20 | 200 |
| ifosfamide | 5 | 100 |
| minoxidil | 12 mg/L | 120 mg/L |
| hydralazine | 2.5 | 25 |
| BI-QT | 10 | 50 |
| clenbuterol | 0.4 | 4 |
| isoproterenol | 0.05 | 0.5 |
| norepinephrine | 0.05 | 0.5 |
| epinephrine | 0.1 | 1 |

[0126] After administration, the dosed animals were observed and tissues were collected as described below:

[0127] Observation of Animals

[0128] 1. Clinical Observations—Twice daily: mortality and moribundity check. Cage Side Observations—skin and fur, eyes and mucous membrane, respiratory system, circulatory system, autonomic and central nervous system, somatomotor pattern, and behavior pattern.

[0129] Potential signs of toxicity, including tremors, convulsions, salivation, diarrhea, lethargy, coma or other a typical behavior or appearance, were recorded as they occurred and included a time of onset, degree, and duration.

[0130] 2. Physical Examinations—Prior to randomization, prior to initial treatment, and prior to sacrifice.

[0131] 3. Body Weights—Prior to randomization, prior to initial treatment, and prior to sacrifice.

[0132] Clinical Pathology

[0133] 1. Frequency Prior to necropsy.

[0134] 2. Number of animals All surviving animals.

[0135] 3. Bleeding Procedure Blood was obtained by puncture of the orbital sinus while under 70% CO₂/30% O₂ anesthesia.

[0136] 4. Collection of Blood Samples Approximately 0.5 mL of blood was collected into EDTA tubes for evaluation of hematology parameters. Approximately 1 mL of blood was collected into serum separator tubes for clinical chemistry analysis. Approximately 200 uL of plasma was obtained and frozen at ˜−80° C. for test compound/metabolite estimation. An additional ˜2 mL of blood was collected into a 15 mL conical polypropylene vial to which ˜3 mL of Trizol was immediately added. The contents were immediately mixed with a vortex and by repeated inversion. The tubes were frozen in liquid nitrogen and stored at ˜−80° C.

[0137] Termination Procedures

[0138] Terminal Sacrifice

[0139] Approximately 3, 6, 24, 48, 144, 168, 192, 336, and/or 360 hours after the initial dose, rats were weighed, physically examined, sacrificed by decapitation, and exsanguinated. The animals were necropsied within approximately five minutes of sacrifice. Separate sterile, disposable instruments were used for each animal, with the exception of bone cutters, which were used to open the skull cap. The bone cutters were dipped in disinfectant solution between animals.

[0140] Necropsies were conducted on each animal following procedures approved by board-certified pathologists.

[0141] Animals not surviving until terminal sacrifice were discarded without necropsy (following euthanasia by carbon dioxide asphyxiation, if moribund). The approximate time of death for moribund or found dead animals was recorded.

[0142] Postmortem Procedures

[0143] Fresh and sterile disposable instruments were used to collect tissues. Gloves were worn at all times when handling tissues or vials. All tissues were collected and frozen within approximately 5 minutes of the animal's death. The liver sections and kidneys were frozen within approximately 3-5 minutes of the animal's death. The time of euthanasia, an interim time point at freezing of liver sections and kidneys, and time at completion of necropsy were recorded. Tissues were stored at approximately −80° C. or preserved in 10% neutral buffered formalin.

[0144] Tissue Collection and Processing

[0145] Liver

[0146] 1. Right medial lobe—snap frozen in liquid nitrogen and stored at ˜−80° C.

[0147] 2. Left medial lobe—Preserved in 10% neutral-buffered formalin (NBF) and evaluated for gross and microscopic pathology.

[0148] 3. Left lateral lobe—snap frozen in liquid nitrogen and stored at ˜−80° C.

[0149] Heart

[0150] A sagittal cross-section containing portions of the two atria and of the two ventricles was preserved in 10% NBF. The remaining heart was frozen in liquid nitrogen and stored at ˜−80° C.

[0151] Kidneys (Both)

[0152] 1. Left—Hemi-dissected; half was preserved in 10% NBF and the remaining half was frozen in liquid nitrogen and stored at ˜−80° C.

[0153] 2. Right—Hemi-dissected; half was preserved in 10% NBF and the remaining half was frozen in liquid nitrogen and stored at ˜−80° C.

[0154] Testes (Both)

[0155] A sagittal cross-section of each testis was preserved in 10% NBF. The remaining testes were frozen together in liquid nitrogen and stored at ˜−80° C.

[0156] Brain (Whole)

[0157] A cross-section of the cerebral hemispheres and of the diencephalon was preserved in 10% NBF, and the rest of the brain was frozen in liquid nitrogen and stored at ˜−80° C.

[0158] Microarray sample preparation was conducted with minor modifications, following the protocols set forth in the Affymetrix GeneChip Expression Analysis Manual. Frozen tissue was ground to a powder using a Spex Certiprep 6800 Freezer Mill. Total RNA was extracted with Trizol (GibcoBRL) utilizing the manufacturer's protocol. The total RNA yield for each sample was 200-500 μg per 300 mg tissue weight. mRNA was isolated using the Oligotex mRNA Midi kit (Qiagen) followed by ethanol precipitation. Double stranded cDNA was generated from mRNA using the SuperScript Choice system (GibcoBRL). First strand cDNA synthesis was primed with a T7-(dT24) oligonucleotide. The cDNA was phenol-chloroform extracted and ethanol precipitated to a final concentration of 1μg/ml. From 2 μg of cDNA, cRNA was synthesized using Ambion's T7 MegaScript in vitro Transcription Kit.

[0159] To biotin label the cRNA, nucleotides Bio-11-CTP and Bio-16-UTP (Enzo Diagnostics) were added to the reaction. Following a 37° C. incubation for six hours, impurities were removed from the labeled cRNA following the RNeasy Mini kit protocol (Qiagen). cRNA was fragmented (fragmentation buffer consisting of 200 mM Tris-acetate, pH 8.1, 500 mM KOAc, 150 mM MgOAc) for thirty-five minutes at 94° C. Following the Affymetrix protocol, 55 μg of fragmented cRNA was hybridized on the Affymetrix rat array set for twenty-four hours at 60 rpm in a 45° C. hybridization oven. The chips were washed and stained with Streptavidin Phycoerythrin (SAPE) (Molecular Probes) in Affymetrix fluidics stations. To amplify staining, SAPE solution was added twice with an anti-streptavidin biotinylated antibody (Vector Laboratories) staining step in between. Hybridization to the probe arrays was detected by fluorometric scanning (Hewlett Packard Gene Array Scanner). Data was analyzed using Affymetrix GeneChip® version 2.0 and Expression Data Mining (EDMT) software (version 1.0), Gene Logic's GeneExpress® 2000 software and S-Plus™ software.

[0160] Tables 1 and 2 disclose those genes that are differentially expressed upon exposure to the named toxins and their corresponding GenBank Accession and Sequence Identification numbers, the identities of the metabolic pathways in which the genes function, the gene names if known, and the unigene cluster titles. The model code represents the various toxicity state that each gene is able to discriminate as well as the individual toxin type associated with each gene. The codes are defined in Table 4. The GLGC ID is the internal Gene Logic identification number.

[0161] Table 3 discloses those genes that are the human homologues of those genes in Tables 1 and 2 that are differentially expressed upon exposure to the named toxins. The corresponding GenBank Accession and Sequence Identification numbers, the gene names if known, and the unigene cluster titles of the human homologues are listed.

[0162] Table 4 defines the comparison codes used in Tables 1, 2, 3, and 5.

[0163] Tables 5-5I disclose the summary statistics for each of the comparisons performed. Each of these tables contains a set of predictive genes and creates a model for predicting the cardiotoxicity of an unknown, i.e., untested compound. Each gene is identified by its Gene Logic identification number and can be cross-referenced to a gene name and representative SEQ ID NO. in Tables 1 and 2. For each comparison of gene expression levels between samples in the toxicity group (samples affected by exposure to a specific toxin) and samples in the non-toxicity group (samples not affected by exposure to that same specific toxin), the tox mean (for toxicity group samples) is the mean signal intensity, as normalized for the various chip parameters that are being assayed. The non-tox mean represents the mean signal intensity, as normalized for the various chip parameters that are being assayed, in samples from animals other than those treated with the high dose of the specific toxin. These animals were treated with a low dose of the specific toxin, or with vehicle alone, or with a different toxin. Samples in the toxicity groups were obtained from animals sacrificed at the timepoint(s) indicated in the Table 5-5I headings, while samples in the non-toxicity groups were obtained from animals sacrificed at all time points in the experiments. For individual genes, an increase in the tox mean compared to the non-tox mean indicates up-regulation upon exposure to a toxin. Conversely, a decrease in the tox mean compared to the non-tox mean indicates down-regulation.

[0164] The mean values are derived from Average Difference (AveDiff) values for a particular gene, averaged across the corresponding samples. Each individual Average Difference value is calculated by integrating the intensity information from multiple probe pairs that are tiled for a particular fragment. The normalization multiplies each expression intensity for a given experiment (chip) by a global scaling factor. The intent of this normalization is to make comparisons of individual genes between chips possible. The scaling factor is calculated as follows:

[0165] 1. From all the unnormalized expression values in the experiment, delete the largest 2% and smallest 2% of the values. That is, if the experiment yields 10,000 expression values, order the values and delete the smallest 200 and largest 200.

[0166] 2. Compute the trimmed mean, which is equal to the mean of the remaining values.

[0167] 3. Compute the scale factor SF=100/(trimmed mean)

[0168] The value of 100 used here is the standard target valued used. Some AveDiff values may be negative due to the general noise involved in nucleic acid hybridization experiments. Although many conclusions can be made corresponding to a negative value on the GeneChip platform, it is difficult to assess the meaning behind the negative value for individual fragments. Our observations show that, although negative values are observed at times within the predictive gene set, these values reflect a real biological phenomenon that is highly reproducible across all the samples from which the measurement was taken. For this reason, those genes that exhibit a negative value are included in the predictive set. It should be noted that other platforms of gene expression measurement may be able to resolve the negative numbers for the corresponding genes. The predictive ability of each of those genes should extend across platforms, however. Each mean value is accompanied by the standard deviation for the mean. The linear discriminant analysis score (discriminant score), as disclosed in the tables, measures the ability of each gene to predict whether or not a sample is toxic. The discriminant score is calculated by the following steps:

[0169] Calculation of a discriminant score

[0170] Let Xᵢ represent the AveDiff values for a given gene across the non-tox samples, i=1 . . . n.

[0171] Let Yᵢ represent the AveDiff values for a given gene across the tox samples, i=1 . . . t.

[0172] The calculations proceed as follows:

[0173] 1. Calculate mean and standard deviation for Xᵢ's and Yᵢ's, and denote these by m_{X}, m_{Y}, s_{X},s_{Y}.

[0174] 2. For all Xᵢ's and Yᵢ's, evaluate the function f(z)=((1/s_{Y})*exp(−0.5*((z−m_{Y})/s_{Y})²))/(((1/s_{Y})*exp(−0.5*((z−m_{Y})/s_{Y})²))+((1/s_{X})*exp(−0.5*((z−m_{X})/s_{X})²))).

[0175] 3. The number of correct predictions, say P, is then the number of Yᵢ's such that f(Yᵢ)>0.5 plus the number of Xᵢ's such that f(Xᵢ )<0.5.

[0176] 4. The discriminant score is then P/(n+t).

[0177] Linear discriminant analysis uses both the individual measurements of each gene and the calculated measurements of all combinations of genes to classify samples. For each gene a weight is derived from the mean and standard deviation of the toxic and nontox groups. Every gene is multiplied by a weight and the sum of these values results in a collective discriminate score. This discriminant score is then compared against collective centroids of the tox and nontox groups. These centroids are the average of all tox and nontox samples respectively. Therefore, each gene contributes to the overall prediction. This contribution is dependent on weights that are large positive or negative numbers if the relative distances between the tox and nontox samples for that gene are large and small numbers if the relative distances are small. The discriminant score for each unknown sample and centroid values can be used to calculate a probability between zero and one as to the group in which the unknown sample belongs.

### Example 2

### General Toxicity Modeling

[0178] Samples were selected for grouping into tox-responding and non-tox-responding groups by examining each study individually with Principal Components Analysis (PCA) to determine which treatments had an observable response. Only groups where confidence of their tox-responding and non-tox-responding status was established were included in building a general tox model (Tables 5-5I).

[0179] Linear discriminant models were generated to describe toxic and non-toxic samples. The top discriminant genes and/or EST's were used to determine toxicity by calculating each gene's contribution with homo and heteroscedastic treatment of variance and inclusion or exclusion of mutual information between genes. Prediction of samples within the database exceeded 80% true positives with a false positive rate of less than 5%. It was determined that combinations of genes and/or EST's generally provided a better predictive ability than individual genes and that the more genes and/or EST used the better predictive ability. Although the preferred embodiment includes fifty or more genes, many pairings or greater combinations of genes and/or EST can work better than individual genes. All combinations of two or more genes from the selected list (Tables 5-5I) could be used to predict toxicity. These combinations could be selected by pairing in an agglomerate, divisive, or random approach. Further, as yet undetermined genes and/or EST's could be combined with individual or combination of genes and/or EST's described here to increase predictive ability. However, the genes and/or EST's described here would contribute most of the predictive ability of any such undetermined combinations.

[0180] Other variations on the above method can provide adequate predictive ability. These include selective inclusion of components via agglomerate, divisive, or random approaches or extraction of loading and combining them in agglomerate, divisive, or random approaches. Also the use of composite variables in logistic regression to determine classification of samples can also be accomplished with linear discriminate analysis, neural or Bayesian networks, or other forms of regression and classification based on categorical or continual dependent and independent variables.

### Example 3

### Modeling Methods

[0181] The above modeling methods provide broad approaches of combining the expression of genes to predict sample toxicity. One could also provide no weight in a simple voting method or determine weights in a supervised or unsupervised method using agglomerate, divisive, or random approaches. All or selected combinations of genes may be combined in ordered, agglomerate, or divisive, supervised or unsupervised clustering algorithms with unknown samples for classification. Any form of correlation matrix may also be used to classify unknown samples. The spread of the group distribution and discriminate score alone provide enough information to enable a skilled person to generate all of the above types of models with accuracy that can exceed discriminate ability of individual genes. Some examples of methods that could be used individually or in combination after transformation of data types include but are not limited to: Discriminant Analysis, Multiple Discriminant Analysis, logistic regression, multiple regression analysis, linear regression analysis, conjoint analysis, canonical correlation, hierarchical cluster analysis, k-means cluster analysis, self-organizing maps, multidimensional scaling, structural equation modeling, support vector machine determined boundaries, factor analysis, neural networks, bayesian classifications, and resampling methods.

### Example 4

### Individual Compound Markers

[0182] The mechanism of action of a particular compound's induced toxicity, as exhibited by gene expression, may differ from all other compounds' mechanisms of induced toxicity. Therefore, markers of toxicity were identified that separated a specific compound's mode of toxicity from all other modes of toxicity exhibited by all other compounds in the database. These markers were identified for each of the cardiotoxins. The top 10, 25, 50, 100 genes based on individual discriminate scores were used in a model to ensure that combination of genes provided a better prediction than individual genes. As described above, all combinations of two or more genes from this list could potentially provide better prediction than individual genes when selected in any order or by ordered, agglomerate, divisive, or random approaches. In addition, combining these genes with other genes could provide better predictive ability, but most of this predictive ability would come from the genes listed herein.

[0183] Samples may be considered toxic if they score positive in any individual compound represented here or in any modeling method mentioned under general toxicology models based on combination of individual time and dose grouping of individual toxic compounds obtainable from the data. Most logical groupings with one or more genes and one or more sample dose and time points should produce better predictions of general toxicity or similarity to known toxicant than individual genes.

[0184] Although the present invention has been described in detail with reference to examples above, it is understood that various modifications can be made without departing from the spirit of the invention. Accordingly, the invention is limited only by the following claims. All cited patents, patent applications and publications referred to in this application are herein incorporated by reference in their entirety.

TABLE 1
Attorney Docket No. 44921-5090US Document No. 1828250.1

| Seq. | | GenBank | | | Model |
|---|---|---|---|---|---|
| ID No. | Identifier | Acc. No. | Gene Name | Unigene Cluster Title | Code |
| 1 | 16130 | J01435 | unknown Glu-Pro dipeptide | unknown Glu-Pro dipeptide repeat | a, c, f, |
| | | | repeat protein | protein | General |
| 1 | 25319 | J01435 | unknown Glu-Pro dipeptide | unknown Glu-Pro dipeptide repeat | a, c, f |
| | | | repeat protein | protein | |
| 1 | 25050 | J01435 | unknown Glu-Pro dipeptide | unknown Glu-Pro dipeptide repeat | c, f, g |
| | | | repeat protein | protein | |
| 2 | 25051 | J01436 | | | a, c |
| 3 | 25439 | M35826 | | | a, c, f, g |
| 4 | 16132 | AA850885 | unknown Glu-Pro dipeptide | unknown Glu-Pro dipeptide repeat | a, c |
| | | | repeat protein | protein | |
| 5 | 6153 | AA875531 | procollagen, type I, alpha 2 | Rattus norvegicus CDK110 mRNA, | e |
| | | | | procollagen, type I, alpha 2 | |
| 6 | 15666 | AA892248 | | | a, f |
| 7 | 19421 | AA945152 | NG, NG dimethylarginine | NG, NG dimethylarginine | a, c |
| | | | dimethylaminohydrolase | dimethylaminohydrolase | |
| 8 | 14981 | AI103396 | | Rattus norvegicus CDK110 mRNA | a, c, f |
| 9 | 14982 | AI171355 | | Rattus norvegicus CDK110 mRNA | a, f |
| 10 | 14983 | AI179150 | | Rattus norvegicus CDK110 mRNA | a, c, f |
| 11 | 21152 | X14848 | golgi SNAP receptor complex | golgi SNAP receptor complex | a, b, c, f, g |
| | | | member 1 | member 1 | |
| 12 | 15511 | NM_012498 | Rattus norvegicus Aldehyde | Aldehyde reductase 1 (low Km | h |
| | | | reductase 1 (low Km aldose | aldose reductase) (5.8 kb Pstl | |
| | | | reductase) (5.8 kb Pstl fragment, | fragment, probably the functional | |
| | | | probably the functional gene) | gene) | |
| | | | (Akr1b1), mRNA. Length = 1339 | | |
| 13 | 7063 | NM_012495 | Rattus norvegicus Aldolase A, | Aldolase A, fructose-bisphosphate | c |
| | | | fructose-bisphosphate (Aldoa), | | |
| | | | mRNA. Length = 1442 | | |
| 14 | 7427 | NM_012515 | Rattus norvegicus | Benzodiazepin receptor (peripheral) | h |
| | | | Benzodiazepin receptor | | |
| | | | (peripheral) (Bzrp), mRNA. | | |
| | | | Length = 781 | | |
| 15 | 15741 | NM_012520 | Rattus norvegicus Catalase | Catalase | c, g |
| | | | (Cat), mRNA. Length = 2495 | | |
| 16 | 4468 | NM_012529 | Rattus norvegicus Creatine | Creatine kinase, brain | e |
| | | | kinase, brain (Ckb), mRNA. | | |
| | | | Length = 1146 | | |
| 17 | 23869 | NM_012551 | Rattus norvegicus Early growth | Early growth response 1 | General |
| | | | response 1 (Egr1), mRNA. | | |
| | | | Length = 3112 | | |
| 18 | 19408 | NM_012554 | Rattus norvegicus Enolase 1, | Enolase 1, alpha | h |
| | | | alpha (Eno1), mRNA. Length = | | |
| | | | 1725 | | |
| 19 | 6477 | NM_012559 | Rattus norvegicus Fibrinogen, | Fibrinogen, gamma polypeptide | g |
| | | | gamma polypeptide (Fgg), | | |
| | | | mRNA. Length = 1358 | | |
| 20 | 16080 | NM_012580 | Rattus norvegicus Heme | Heme oxygenase | General |
| | | | oxygenase (Hmox1), mRNA. | | |
| | | | Length = 870 | | |
| 21 | 20313 | NM_012585 | Rattus norvegicus 5- | 5-Hydroxytryptamine (serotonin) | General |
| | | | Hydroxytryptamine (serotonin) | receptor 1A | |
| | | | receptor 1A (Htr1a), mRNA. | | |
| | | | Length = 1269 | | |
| 22 | 15098 | NM_012588 | Rattus norvegicus Insulin-like | Insulin-like growth factor-binding | c |
| | | | growth factor-binding protein | protein (IGF-BP3) | |
| | | | (IGF-BP3) (Igfbp3), mRNA. | | |
| | | | Length = 2352 | | |
| 23 | 24716 | NM_012589 | Rattus norvegicus Interleukin 6 | Interleukin 6 (interferon, beta 2) | General |
| | | | (interferon, beta 2) (II6), mRNA. | | |
| | | | Length = 1046 | | |
| 24 | 2629 | NM_012603 | Rattus norvegicus Avian | Avian myelocytomatosis viral (v- | General |
| | | | myelocytomatosis viral (v-myc) | myc) oncogene homolog | |
| | | | oncogene homolog (Myc), | | |
| | | | mRNA. Length = 2168 | | |
| 25 | 23523 | NM_012615 | Rattus norvegicus Ornitine | Ornitine decarboxylase | General |
| | | | decarboxylase (Odc1), mRNA. | | |
| | | | Length = 2442 | | |
| 26 | 20589 | NM_012618 | Rattus norvegicus S100 calcium- | Protein 9 Ka homologous to | General |
| | | | binding protein A4 (S100a4), | calcium-binding protein | |
| | | | mRNA. Length = 487 | | |
| 27 | 15540 | NM_012620 | Rattus norvegicus serine (or | Plasminogen activator inhibitor | General |
| | | | cysteine) proteinase inhibitor, | | |
| | | | clade E (nexin, plasminogen | | |
| | | | activator inhibitor type 1), | | |
| | | | member 1 (Serpine1), mRNA. | | |
| | | | Length = 3053 | | |
| 28 | 18725 | NM_012645 | Rattus norvegicus RT1 class Ib | Rattus norvegicus MHC class Ib | c |
| | | | gene (RT1Aw2), mRNA. Length = | RT1.S3 (RT1.S3) mRNA, partial | |
| | | | 1540 | cds | |
| 28 | 18726 | NM_012645 | Rattus norvegicus RT1 class Ib | Rattus norvegicus MHC class Ib | General |
| | | | gene (RT1Aw2), mRNA. Length = | RT1.S3 (RT1.S3) mRNA, partial | |
| | | | 1540 | cds | |
| 29 | 9423 | NM_012649 | Rattus norvegicus | Ryudocan/syndecan 4 | General |
| | | | Ryudocan/syndecan 4 (Sdc4), | | |
| | | | mRNA. Length = 2462 | | |
| 29 | 9424 | NM_012649 | Rattus norvegicus | Ryudocan/syndecan 4 | General |
| | | | Ryudocan/syndecan 4 (Sdc4), | | |
| | | | mRNA. Length = 2462 | | |
| 30 | 16224 | NM_012656 | Rattus norvegicus Secreted | Secreted acidic cystein-rich | c |
| | | | acidic cystein-rich glycoprotein | glycoprotein (osteonectin) | |
| | | | (osteonectin) (Sparc), mRNA. | | |
| | | | Length = 2025 | | |
| 31 | 1514 | NM_012678 | Rattus norvegicus Tropomyosin | Tropomycin 4 | c, h, |
| | | | 4 (Tpm4), mRNA. Length = 900 | | General |
| 32 | 20776 | NM_012680 | Rattus norvegicus Tuberous | Tuberous sclerosis 2, (renal | General |
| | | | sclerosis 2, (renal carcinoma) | carcinoma) | |
| | | | (Tsc2), mRNA. Length = 5573 | | |
| 33 | 25650 | NM_012736 | Rattus norvegicus Glycerol-3- | | f |
| | | | phosophate dehydrogenase 2 | | |
| | | | (mitochondrial) (Gpd2), mRNA. | | |
| | | | Length = 2400 | | |
| 34 | 344 | NM_012747 | Rattus norvegicus Signal | Signal transducer and activator of | b |
| | | | transducer and activator of | transcription 3 | |
| | | | transcription 3 (Stat3), mRNA. | | |
| | | | Length = 2924 | | |
| 35 | 8829 | NM_012749 | Rattus norvegicus Nucleolin | Nucleolin | h, General |
| | | | (Ncl), mRNA. Length = 2142 | | |
| 36 | 3601 | NM_012751 | Rattus norvegicus solute carrier | Glucose transporter 4, insuline- | d |
| | | | family 2 (facilitated glucose | responsive | |
| | | | transporter), member 4 (Glut4), | | |
| | | | mRNA. Length = 2506 | | |
| 37 | 15174 | NM_012756 | Rattus norvegicus Insulin-like | Insulin-like growth factor 2 receptor | b |
| | | | growth factor 2 receptor (Igf2r), | | |
| | | | mRNA. Length = 8810 | | |
| 38 | 1349 | NM_012776 | Rattus norvegicus adrenergic | G-protein-linked receptor kinase | General |
| | | | receptor kinase, beta 1 (Adrbk1), | (beta adrenergic receptor kinase 1) | |
| | | | mRNA. Length = 2683 | | |
| 39 | 449 | NM_012786 | Rattus norvegicus Cytochrome c | Cytochrom c oxidase subunit VIII-H | a, b |
| | | | oxidase subunit VIII-H | (heart/muscle) | |
| | | | (heart/muscle) (Cox8h), mRNA. | | |
| | | | Length = 330 | | |
| 40 | 961 | NM_012796 | Rattus norvegicus glutathione S- | glutathione S-transferase, theta 2 | e |
| | | | transferase, theta 2 (Gstt2), | | |
| | | | mRNA. Length = 1258 | | |
| 41 | 15032 | NM_012816 | Rattus norvegicus alpha- | Methylacyl-CoA racemase alpha | g, i |
| | | | methylacyl-CoA racemase | | |
| | | | (Amacr), mRNA. Length = 1504 | | |
| 42 | 18109 | NM_012823 | Rattus norvegicus Annexin A3 | ESTs, Weakly similar to LURT3 | General |
| | | | (Anx3), mRNA. Length = 1454 | annexin III - rat [R. norvegicus] | |
| 43 | 11137 | NM_012839 | Rattus norvegicus Cytochrome | Cytochrome C, expressed in | g |
| | | | C, expressed in somatic tissues | somatic tissues | |
| | | | (Cycs), mRNA. Length = 318 | | |
| 44 | 17541 | NM_012844 | Rattus norvegicus Epoxide | Epoxide hydrolase 1 (microsomal | a, c, |
| | | | hydrolase 1 (microsomal | xenobiotic hydrolase) | General |
| | | | xenobiotic hydrolase) (Ephx1), | | |
| | | | mRNA. Length = 1242 | | |
| 45 | 17305 | NM_012876 | Rattus norvegicus Ribosomal | Ribosomal protein S29 | b, e, g |
| | | | protein S29 (Rps29), mRNA. | | |
| | | | Length = 318 | | |
| 46 | 1748 | NM_012889 | Rattus norvegicus Vascular cell | Vascular cell adhesion molecule 1 | a, General |
| | | | adhesion molecule 1 (Vcam1), | | |
| | | | mRNA. Length = 3007 | | |
| 47 | 16721 | NM_012891 | Rattus norvegicus Acyl-Coa | Acyl-Coa dehydrogenase, Very long | General |
| | | | dehydrogenase, Very long chain | chain | |
| | | | (Acadvl), mRNA. Length = 2117 | | |
| 48 | 16274 | NM_012898 | Rattus norvegicus alpha 2 HS- | alpha 2 HS-glycoprotein alpha 2 | a |
| | | | glycoprotein alpha 2 (fetuin) | (fetuin) | |
| | | | (Ahsg), mRNA. Length = 1464 | | |
| 49 | 24783 | NM_012914 | Rattus norvegicus ATPase, | ATPase, Ca++ transporting, | h, General |
| | | | Ca++ transporting, ubiquitous | ubiquitous | |
| | | | (Atp2a3), mRNA. Length = 4472 | | |
| 50 | 18695 | NM_012931 | Rattus norvegicus v-crk- | v-crk-associated tyrosine kinase | b, General |
| | | | associated tyrosine kinase | substrate | |
| | | | substrate (Crkas), mRNA. | | |
| | | | Length = 3335 | | |
| 51 | 2555 | NM_012967 | Rattus norvegicus Intercellular | Intercellular adhesion molecule 1 | General |
| | | | adhesion molecule 1 (Icam1), | | |
| | | | mRNA. Length = 2602 | | |
| 52 | 24528 | NM_012973 | Rattus norvegicus Potassium | Potassium (K+) channel protein, | h |
| | | | (K+) channel protein, slowly | slowly activating (Isk) | |
| | | | activating (Isk) (Kcne1), mRNA. | | |
| | | | Length = 585 | | |
| 53 | 956 | NM_012976 | Rattus norvegicus Lectin, | Lectin, galactose binding, soluble 9 | a, General |
| | | | galactose binding, soluble 5 | (Galectin-9) | |
| | | | (Galectin-5) (Lgals5), mRNA. | | |
| | | | Length = 872 | | |
| 54 | 958 | NM_012977 | Rattus norvegicus Lectin, | Lectin, galactose binding, soluble 9 | General |
| | | | galactose binding, soluble 9 | (Galectin-9) | |
| | | | (Galectin-9) (Lgals9), mRNA. | | |
| | | | Length = 1545 | | |
| 55 | 17394 | NM_012992 | Rattus norvegicus | Nucleoplasmin-related protein | General |
| | | | Nucleoplasmin-related protein | (Nuclear protein B23 | |
| | | | (Nuclear protein B23 (Npm1), | | |
| | | | mRNA. Length = 1232 | | |
| 56 | 19392 | NM_012998 | Rattus norvegicus Protein | Protein disulfide isomerase (Prolyl | i |
| | | | disulfide isomerase(Prolyl 4- | 4-hydroxylase, beta polypeptide) | |
| | | | hydroxylase, beta polypeptide) | | |
| | | | (P4hb), mRNA. Length = 2460 | | |
| 57 | 24264 | NM_012999 | Rattus norvegicus Subtilisin - like | Subtilisin - like endoprotease | e |
| | | | endoprotease (Pace4), mRNA. | | |
| | | | Length = 4153 | | |
| 58 | 3405 | NM_013011 | Rattus norvegicus Tyrosine 3- | Tyrosine 3- | i, General |
| | | | monooxygenase/tryptophan 5- | monooxygenase/tryptophan 5- | |
| | | | monooxygenase activation | monooxygenase activation protein, | |
| | | | protein, zeta polypeptide | zeta polypeptide | |
| | | | (Ywhaz), mRNA. Length = 1687 | | |
| 59 | 20229 | NM_013018 | Rattus norvegicus Ras-related | Ras-related small GTP binding | General |
| | | | small GTP binding protein 3A | protein 3A | |
| | | | (Rab3a), mRNA. Length = 743 | | |
| 60 | 1606 | NM_013039 | Rattus norvegicus ATP-binding | Sulfonylurea receptor | g |
| | | | cassette, sub-family C | | |
| | | | (CFTR/MRP), member 8 | | |
| | | | (Abcc8), mRNA. Length = 5099 | | |
| 61 | 730 | NM_013040 | Rattus norvegicus ATP-binding | Sulfonylurea receptor 2 | h |
| | | | cassette, sub-family C | | |
| | | | (CFTR/MRP), member 9 | | |
| | | | (Abcc9), mRNA. Length = 5000 | | |
| 62 | 17401 | NM_013043 | Rattus norvegicus Transforming | Transforming growth factor beta | g, General |
| | | | growth factor beta stimulated | stimulated clone 22 | |
| | | | clone 22 (Tgfb1i4), mRNA. | | |
| | | | Length = 1666 | | |
| 63 | 11114 | NM_013046 | Rattus norvegicus Thyrotropin | Thyrotropin releasing hormone | f, General |
| | | | releasing hormone (Trh), mRNA. | | |
| | | | Length = 768 | | |
| 63 | 11113 | NM_013046 | Rattus norvegicus Thyrotropin | Thyrotropin releasing hormone | f |
| | | | releasing hormone (Trh), mRNA. | | |
| | | | Length = 768 | | |
| 64 | 16924 | NM_013069 | Rattus norvegicus CD74 antigen | CD74 antigen (invariant | b |
| | | | (invariant polpypeptide of major | polpypeptide of major | |
| | | | histocompatibility class II antigen- | histocompatibility class II antigen- | |
| | | | associated) (Cd74), mRNA. | associated) | |
| | | | Length = 1150 | | |
| 64 | 25676 | NM_013069 | Rattus norvegicus CD74 antigen | | b |
| | | | (invariant polpypeptide of major | | |
| | | | histocompatibility class II antigen- | | |
| | | | associated) (Cd74), mRNA. | | |
| | | | Length = 1150 | | |
| 64 | 16925 | NM_013069 | Rattus norvegicus CD74 antigen | CD74 antigen (invariant | b |
| | | | (invariant polpypeptide of major | polpypeptide of major | |
| | | | histocompatibility class II antigen- | histocompatibility class II antigen- | |
| | | | associated) (Cd74), mRNA | associated) | |
| | | | Length = 1150 | | |
| 65 | 357 | NM_013086 | Rattus norvegicus CAMP | CAMP responsive element | General |
| | | | responsive element modulator | modulator | |
| | | | (Crem), mRNA. Length = 607 | | |
| 66 | 1521 | NM_013091 | Rattus norvegicus Tumor | Tumor necrosis factor receptor | i |
| | | | necrosis factor receptor | | |
| | | | superfamily, member 1a (Tnfr1), | | |
| | | | mRNA. Length = 2130 | | |
| 67 | 1684 | NM_013096 | Rattus norvegicus Hemoglobin, | Hemoglobin, alpha 1 | a, b |
| | | | alpha 1 (Hba1), mRNA. Length = | | |
| | | | 556 | | |
| 67 | 26150 | NM_013096 | Rattus norvegicus Hemoglobin, | | a, b |
| | | | alpha 1 (Hba1), mRNA. Length = | | |
| | | | 556 | | |
| 67 | 1689 | NM_013096 | Rattus norvegicus Hemoglobin, | Hemoglobin, alpha 1 | a, b, |
| | | | alpha 1 (Hba1), mRNA. Length = | | General |
| | | | 556 | | |
| 67 | 1685 | NM_013096 | Rattus norvegicus Hemoglobin, | Hemoglobin, alpha 1 | a |
| | | | alpha 1 (Hba1), mRNA. Length = | | |
| | | | 556 | | |
| 67 | 1688 | NM_013096 | Rattus norvegicus Hemoglobin, | Hemoglobin, alpha 1 | a, b |
| | | | alpha 1 (Hba1), mRNA. Length = | | |
| | | | 556 | | |
| 68 | 1321 | NM_013098 | Rattus norvegicus Glucose-6- | Glucose-6-phosphatase | a |
| | | | phosphatase (G6pc), mRNA. | | |
| | | | Length = 2237 | | |
| 69 | 19949 | NM_013106 | Rattus norvegicus Guanine | Guanine nucleotide binding, protein, | General |
| | | | nucleotide binding, protein, alpha | alpha inhibiting polypeptide 3 | |
| | | | inhibiting polypeptide 3 (Gnai3), | | |
| | | | mRNA. Length = 3072 | | |
| 70 | 23709 | NM_013113 | Rattus norvegicus ATPase | ATPase Na+/K+ transporting beta 1 | g |
| | | | Na+/K+ transporting beta 1 | polypeptide | |
| | | | polypeptide (Atp1b1), mRNA. | | |
| | | | Length = 2528 | | |
| 71 | 2005 | NM_013127 | Rattus norvegicus CD38 antigen | CD38 antigen (ADP-ribosyl cyclase/ | c |
| | | | (ADP-ribosyl cyclase/cyclic | cyclic ADP-ribose hydrolase) | |
| | | | ADP-ribose hydrolase) (Cd38), | | |
| | | | mRNA. Length = 2248 | | |
| 72 | 14299 | NM_013129 | Rattus norvegicus Interleukin 15 | Interleukin 15 | General |
| | | | (II15), mRNA. Length = 1313 | | |
| 73 | 16982 | NM_013144 | Rattus norvegicus Insulin-like | Insulin-like growth factor binding | General |
| | | | growth factor binding protein 1 | protein 1 | |
| | | | (Igfbp1), mRNA. Length = 1500 | | |
| 74 | 21683 | NM_013154 | Rattus norvegicus | CCAAT/enhancerbinding, protein | General |
| | | | CCAAT/enhancerbinding, protein | (C/EBP) delta | |
| | | | (C/EBP) delta (Cebpd), mRNA. | | |
| | | | Length = 1200 | | |
| 74 | 21682 | NM_013154 | Rattus norvegicus | CCAAT/enhancerbinding, protein | General |
| | | | CCAAT/enhancerbinding, protein | (C/EBP) delta | |
| | | | (C/EBP) delta (Cebpd), mRNA. | | |
| | | | Length = 1200 | | |
| 75 | 24867 | NM_013155 | Rattus norvegicus Very low | Very low density lipoprotein | General |
| | | | density lipoprotein receptor | receptor | |
| | | | (Vldlr), mRNA. Length = 2952 | | |
| 76 | 25567 | NM_013156 | Rattus norvegicus Cathepsin L | | d, General |
| | | | (Ctsl), mRNA. Length = 1386 | | |
| 76 | 3431 | NM_013156 | Rattus norvegicus Cathepsin L | Cathepsin L | General |
| | | | (Ctsl), mRNA. Length = 1386 | | |
| 76 | 3430 | NM_013156 | Rattus norvegicus Cathepsin L | Cathepsin L | d, General |
| | | | (Ctsl), mRNA. Length = 1386 | | |
| 77 | 1714 | NM_013187 | Rattus norvegicus | Phospholipase C, gamma 1 | g, i, |
| | | | Phospholipase C, gamma 1 | | General |
| | | | (Plcg1), mRNA. Length = 5106 | | |
| 78 | 16448 | NM_013197 | Rattus norvegicus | Aminolevulinate synthase 2, delta | a, b, |
| | | | Aminolevulinate synthase 2, | | General |
| | | | delta (Alas2), mRNA. Length = | | |
| | | | 1899 | | |
| 79 | 20826 | NM_013218 | Rattus norvegicus adenylate | adenylate kinase 3 | h |
| | | | kinase 3 (Ak3), mRNA. Length = | | |
| | | | 1061 | | |
| 80 | 18313 | NM_013220 | Rattus norvegicus cardiac | cardiac ankyrin repeat protein | f, g, i, |
| | | | ankyrin repeat protein (AIrp), | | General |
| | | | mRNA. Length = 1749 | | |
| 81 | 815 | NM_013224 | Rattus norvegicus ribosomal | ribosomal protein S26 | e, General |
| | | | protein S26 (Rps26), mRNA. | | |
| | | | Length = 435 | | |
| 82 | 15239 | NM_016989 | Rattus norvegicus adenylate | R. norvegicus (Sprague Dawley) | h |
| | | | cyclase activating polypeptide 1 | ribosomal protein L15 mRNA | |
| | | | (Adcyap1), mRNA. Length = | | |
| | | | 2681 | | |
| 83 | 3202 | NM_017039 | Rattus norvegicus Protein | Protein phosphatase 2 (formerly | h |
| | | | phosphatase 2 (formerly 2A), | 2A), catalytic subunit, alpha isoform | |
| | | | catalytic subunit, alpha isoform | | |
| | | | (Ppp2ca), mRNA. Length = 1804 | | |
| 83 | 3203 | NM_017039 | Rattus norvegicus Protein | Protein phosphatase 2 (formerly | h |
| | | | phosphatase 2 (formerly 2A), | 2A), catalytic subunit, alpha isoform | |
| | | | catalytic subunit, alpha isoform | | |
| | | | (Ppp2ca), mRNA. Length = 1804 | | |
| 84 | 24596 | NM_017040 | Rattus norvegicus Protein | Protein phosphatase 2 (formerly | h |
| | | | phosphatase 2 (formerly 2A), | 2A), catalytic subunit, beta isoform | |
| | | | catalytic subunit, beta isoform | | |
| | | | (Ppp2cb), mRNA. Length = 1843 | | |
| 85 | 6654 | NM_017068 | Rattus norvegicus Lysosomal- | Lysosomal-associated membrane | a |
| | | | associated membrane protein 2 | protein 2 | |
| | | | (Lamp2), mRNA. Length = 1548 | | |
| 86 | 11152 | NM_017073 | Rattus norvegicus Glutamine | Glutamine synthetase (glutamate- | General |
| | | | synthetase (glutamate-ammonia | ammonia ligase) | |
| | | | ligase) (Glul), mRNA. Length = | | |
| | | | 2793 | | |
| 86 | 11153 | NM_017073 | Rattus norvegicus Glutamine | Glutamine synthetase (glutamate- | General |
| | | | synthetase (glutamate-ammonia | ammonia ligase) | |
| | | | ligase) (Glul), mRNA. Length = | | |
| | | | 2793 | | |
| 87 | 22552 | NM_017087 | Rattus norvegicus Small | Small proteoglycan I (biglycan), | General |
| | | | proteoglycan I (biglycan), bone | bone (BSPG1) (bone/cartilage | |
| | | | (BSPG1) (bone/cartilage | proteclycan 1 precursor) | |
| | | | proteclycan 1 precursor) (Bgn), | | |
| | | | mRNA. Length = 2446 | | |
| 88 | 8888 | NM_017090 | Rattus norvegicus guanylate | Guanylate cyclase, soluble, alpha 1 | General |
| | | | cyclase 1, soluble, alpha 3 | (GTP pyrophosphate - lyase) | |
| | | | (Gucy1a3), mRNA. Length = | | |
| | | | 4775 | | |
| 89 | 1435 | NM_017125 | Rattus norvegicus Cd63 antigen | Cd63 antigen | g, General |
| | | | (Cd63), mRNA. Length = 860 | | |
| 90 | 21663 | NM_017126 | Rattus norvegicus ferredoxin 1 | ferredoxin 1 | General |
| | | | (Fdx1), mRNA. Length = 838 | | |
| 91 | 24886 | NM_017138 | Rattus norvegicus laminin | laminin receptor 1 | General |
| | | | receptor 1 (Lamr1), mRNA. | | |
| | | | Length = 1018 | | |
| 92 | 24106 | NM_017141 | Rattus norvegicus DNA | DNA polymerase beta | c |
| | | | polymerase beta (Polb), mRNA. | | |
| | | | Length = 3298 | | |
| 92 | 24107 | NM_017141 | Rattus norvegicus DNA | DNA polymerase beta | General |
| | | | polymerase beta (Polb), mRNA. | | |
| | | | Length = 3298 | | |
| 93 | 20859 | NM_017144 | Rattus norvegicus troponin I, | troponin I, cardiac | a, b, f |
| | | | cardiac (Tnni3), mRNA. Length = | | |
| | | | 830 | | |
| 94 | 15365 | NM_017147 | Rattus norvegicus cofilin 1, non- | cofilin 1, non-muscle | g, h, |
| | | | muscle (Cfl1), mRNA. Length = | | General |
| | | | 1039 | | |
| 95 | 5351 | NM_017150 | Rattus norvegicus ribosomal | ribosomal protein L29 | General |
| | | | protein L29 (Rpl29), mRNA. | | |
| | | | Length = 630 | | |
| 96 | 16953 | NM_017151 | Rattus norvegicus ribosomal | ribosomal protein S15 | e, h |
| | | | protein S15 (Rps15), mRNA. | | |
| | | | Length = 487 | | |
| 97 | 21975 | NM_017154 | Rattus norvegicus xanthine | xanthine dehydrogenase | General |
| | | | dehydrogenase (Xdh), mRNA. | | |
| | | | Length = 4198 | | |
| 98 | 17104 | NM_017160 | Rattus norvegicus ribosomal | ribosomal protein S6 | General |
| | | | protein S6 (Rps6), mRNA. | | |
| | | | Length = 801 | | |
| 98 | 17107 | NM_017160 | Rattus norvegicus ribosomal | ribosomal protein S6 | General |
| | | | protein S6 (Rps6), mRNA. | | |
| | | | Length = 801 | | |
| 99 | 19031 | NM_017180 | Rattus norvegicus T-cell death | T-cell death associated gene | General |
| | | | associated gene (Tdag), mRNA. | | |
| | | | Length = 1353 | | |
| 100 | 15434 | NM_017187 | Rattus norvegicus high mobility | high mobility group protein 2 | f |
| | | | group box 2 (Hmgb2), mRNA. | | |
| | | | Length = 1072 | | |
| 101 | 14696 | NM_017202 | Rattus norvegicus cytochrome c | cytochrome c oxidase, subunit IV | e |
| | | | oxidase, subunit IVa (Cox4a), | | |
| | | | mRNA. Length = 696 | | |
| 102 | 5005 | NM_017209 | Rattus norvegicus nuclear | nuclear receptor binding factor 1 | General |
| | | | receptor binding factor 1 (Nrbf1), | | |
| | | | mRNA. Length = 1302 | | |
| 103 | 20193 | NM_017232 | Rattus norvegicus prostaglandin- | prostaglandin-endoperoxide | General |
| | | | endoperoxide synthase 2 | synthase 2 | |
| | | | (Ptgs2), mRNA. Length = 1827 | | |
| 104 | 20482 | NM_017240 | Rattus norvegicus myosin heavy | myosin heavy chain, cardiac | e |
| | | | chain, cardiac muscle, fetal | muscle, fetal | |
| | | | (Myh7), mRNA. Length = 5925 | | |
| 104 | 3780 | NM_017240 | Rattus norvegicus myosin heavy | EST | e |
| | | | chain, cardiac muscle, fetal | | |
| | | | (Myh7), mRNA. Length = 5925 | | |
| 104 | 20484 | NM_017240 | Rattus norvegicus myosin heavy | myosin heavy chain, cardiac | a, c, e, f |
| | | | chain, cardiac muscle, fetal | muscle, fetal | |
| | | | (Myh7), mRNA. Length = 5925 | | |
| 105 | 17563 | NM_017245 | Rattus norvegicus eukaryotic | eukaryotic translation elongation | g, General |
| | | | translation elongation factor 2 | factor 2 | |
| | | | (Eef2), mRNA. Length = 2626 | | |
| 106 | 15301 | NM_017259 | Rattus norvegicus B-cell | B-cell translocation gene 2, anti- | General |
| | | | translocation gene 2, anti- | proliferative | |
| | | | proliferative (Btg2), mRNA. | | |
| | | | Length = 2519 | | |
| 106 | 15299 | NM_017259 | Rattus norvegicus B-cell | B-cell translocation gene 2, anti- | General |
| | | | translocation gene 2, anti- | proliferative | |
| | | | proliferative (Btg2), mRNA. | | |
| | | | Length = 2519 | | |
| 106 | 15300 | NM_017259 | Rattus norvegicus B-cell | B-cell translocation gene 2, anti- | General |
| | | | translocation gene 2, anti- | proliferative | |
| | | | proliferative (Btg2), mRNA. | | |
| | | | Length = 2519 | | |
| 107 | 3254 | NM_017282 | Rattus norvegicus proteasome | proteasome (prosome, macropain) | h |
| | | | (prosome, macropain) subunit, | subunit, alpha type 5 | |
| | | | alpha type 5 (Psma5), mRNA. | | |
| | | | Length = 970 | | |
| 108 | 82 | NM_017297 | Rattus norvegicus potassium | potassium inwardly-rectifying | i |
| | | | inwardly-rectifying channel, | channel, subfamily J, member 5 | |
| | | | subfamily J, member 5 (Kcnj5), | | |
| | | | mRNA. Length = 3156 | | |
| 109 | 1894 | NM_017320 | Rattus norvegicus cathepsin S | cathepsin S | General |
| | | | (Ctss), mRNA. Length = 1330 | | |
| 110 | 356 | NM_017334 | Rattus norvegicus transcriptional | CAMP responsive element | General |
| | | | repressor CREM (CREM), | modulator | |
| | | | mRNA. Length = 436 | | |
| 110 | 355 | NM_017334 | Rattus norvegicus transcriptional | | General |
| | | | repressor CREM (CREM), | | |
| | | | mRNA. Length = 436 | | |
| 111 | 20848 | NM_017343 | Rattus norvegicus myosin | Rat mRNA for myosin regulatory | c, g |
| | | | regulatory light chain (MRLCB), | light chain (RLC) | |
| | | | mRNA. Length = 1139 | | |
| 112 | 460 | NM_019131 | Rattus norvegicus Tropomyosin | Tropomyosin 1 (alpha) | a |
| | | | 1 (alpha) (Tpm1), mRNA. | | |
| | | | Length = 1004 | | |
| 113 | 5622 | NM_019143 | Rattus norvegicus Fibronectin 1 | Fibronectin 1 | General |
| | | | (Fn1), mRNA. Length = 8329 | | |
| 114 | 17066 | NM_019170 | Rattus norvegicus carbonyl | carbonyl reductase | e |
| | | | reductase (Cbr), mRNA. | | |
| | | | Length = 1018 | | |
| 115 | 1174 | NM_019184 | Rattus norvegicus Cytochrome | Cytochrome P450, subfamily IIC | b |
| | | | P450, subfamily IIC | (mephenytoin 4-hydroxylase) | |
| | | | (mephenytoin 4-hydroxylase) | | |
| | | | (Cyp2c), mRNA. Length = 1856 | | |
| 116 | 18569 | NM_019212 | Rattus norvegicus actin, alpha 1, | actin, alpha 1, skeletal muscle | General |
| | | | skeletal muscle (Acta1), mRNA. | | |
| | | | Length = 1134 | | |
| 117 | 20433 | NM_019232 | Rattus norvegicus | serum/glucocorticoid regulated | b, General |
| | | | serum/glucocorticoid regulated | kinase | |
| | | | kinase (Sgk), mRNA. Length = | | |
| | | | 2435 | | |
| 118 | 17908 | NM_019242 | Rattus norvegicus interferon- | interferon-related developmental | c |
| | | | related developmental regulator | regulator 1 | |
| | | | 1 (lfrd1), mRNA. Length = 1736 | | |
| 119 | 11218 | NM_019247 | Rattus norvegicus paired-like | paired-like homeodomain | General |
| | | | homeodomain transcription | transcription factor 3 | |
| | | | factor 3 (Pitx3), mRNA. Length = | | |
| | | | 1253 | | |
| 120 | 23419 | NM_019257 | Rattus norvegicus splicing factor, | splicing factor, arginine/serine-rich 5 | d |
| | | | arginine/serine-rich 5 (SRp40, | (SRp40, HRS) | |
| | | | HRS) (Sfrs5), mRNA. Length = | | |
| | | | 2781 | | |
| 121 | 21443 | NM_019262 | Rattus norvegicus complement | complement component 1, q | General |
| | | | component 1, q subcomponent, | subcomponent, beta polypeptide | |
| | | | beta polypeptide (C1qb), mRNA. | | |
| | | | Length = 1136 | | |
| 122 | 20735 | NM_019283 | Rattus norvegicus solute carrier | antigen identified by monoclonal | a, d, |
| | | | family 3 (activators of dibasic | antibodies 4F2 | General |
| | | | and neutral amino acid | | |
| | | | transport), member 2 (Slc3a2), | | |
| | | | mRNA. Length = 1940 | | |
| 122 | 20734 | NM_019283 | Rattus norvegicus solute carrier | antigen identified by monoclonal | d |
| | | | family 3 (activators of dibasic | antibodies 4F2 | |
| | | | and neutral amino acid | | |
| | | | transport), member 2 (Slc3a2), | | |
| | | | mRNA. Length = 1940 | | |
| 123 | 10016 | NM_019289 | Rattus norvegicus Actin-related | Actin-related protein complex 1b | i |
| | | | protein complex 1b (Arpc1b), | | |
| | | | mRNA. Length = 1430 | | |
| 124 | 15056 | NM_019291 | Rattus norvegicus carbonic | carbonic anhydrase 2 | General |
| | | | anhydrase 2 (Ca2), mRNA. | | |
| | | | Length = 1459 | | |
| 125 | 20750 | NM_019301 | Rattus norvegicus Complement | Complement receptor related | h |
| | | | receptor related protein (Cr1), | protein | |
| | | | mRNA. Length = 1811 | | |
| 126 | 52 | NM_019335 | Rattus norvegicus Protein | Protein kinase, interferon-inducible | e |
| | | | kinase, interferon-inducible | double stranded RNA dependent | |
| | | | double stranded RNA dependent | | |
| | | | (Prkr), mRNA. Length = 3808 | | |
| 127 | 22675 | NM_019358 | Rattus norvegicus glycoprotein | glycoprotein 38 | General |
| | | | 38 (Gp38), mRNA. Length = | | |
| | | | 1854 | | |
| 128 | 20057 | NM_019370 | Rattus norvegicus alkaline | alkaline phosphodiesterase | g |
| | | | phosphodiesterase (LOC54410), | | |
| | | | mRNA. Length = 2777 | | |
| 129 | 1324 | NM_019371 | Rattus norvegicus factor- | factor-responsive smooth muscle | General |
| | | | responsive smooth muscle | protein | |
| | | | protein (SM-20), mRNA. | | |
| | | | Length = 2825 | | |
| 130 | 22727 | NM_019383 | Rattus norvegicus ATP synthase | ATP synthase subunit d | i |
| | | | subunit d (Atp5jd), mRNA. | | |
| | | | Length = 581 | | |
| 131 | 16 | NM_019386 | Rattus norvegicus tissue-type | tissue-type transglutaminase | General |
| | | | transglutaminase (Tgm2), | | |
| | | | mRNA. Length = 3393 | | |
| 131 | 17 | NM_019386 | Rattus norvegicus tissue-type | tissue-type transglutaminase | General |
| | | | transglutaminase (Tgm2), | | |
| | | | mRNA. Length = 3393 | | |
| 132 | 574 | NM_019905 | Rattus norvegicus calpactin I | Rattus norvegicus clone BB.1.4.1 | g, i, |
| | | | heavy chain (Anxa2), mRNA. | unknown Glu-Pro dipeptide repeat | General |
| | | | Length = 1395 | protein mRNA, complete | |
| | | | | cds, calpactin I heavy | |
| | | | | chain, hydroxyacid oxidase 3 | |
| | | | | (medium-chain) | |
| 133 | 18713 | NM_020075 | Rattus norvegicus eukaryotic | eukaryotic initiation factor 5 (elF-5) | General |
| | | | initiation factor 5 (elF-5) (Eif5), | | |
| | | | mRNA. Length = 3504 | | |
| 133 | 18715 | NM_020075 | Rattus norvegicus eukaryotic | eukaryotic initiation factor 5 (elF-5) | General |
| | | | initiation factor 5 (elF-5) (Eif5), | | |
| | | | mRNA. Length = 3504 | | |
| 134 | 19696 | NM_021699 | Rattus norvegicus | serine/threonine kinase | General |
| | | | serine/threonine kinase | | |
| | | | (LOC60328), mRNA. Length = | | |
| | | | 2572 | | |
| 135 | 19710 | NM_021744 | Rattus norvegicus CD14 antigen | CD14 antigen | i, General |
| | | | (Cd14), mRNA. Length = 1591 | | |
| 136 | 20035 | NM_021754 | Rattus norvegicus Nopp140 | Nopp140 associated protein | General |
| | | | associated protein (Nap65), | | |
| | | | mRNA. Length = 1980 | | |
| 137 | 14397 | NM_021909 | Rattus norvegicus FXYD domain- | FXYD domain-containing ion | g, General |
| | | | containing ion transport regulator | transport regulator 5 | |
| | | | 5 (Fxyd5), mRNA. Length = 940 | | |
| 138 | 17100 | NM_022179 | Rattus norvegicus Hexokinase 3 | Hexokinase 3 | h, General |
| | | | (Hk3), mRNA. Length = 3692 | | |
| 138 | 17101 | NM_022179 | Rattus norvegicus Hexokinase 3 | Hexokinase 3 | General |
| | | | (Hk3), mRNA. Length = 3692 | | |
| 139 | 20204 | NM_022196 | Rattus norvegicus leukemia | leukemia inhibitory factor | i, General |
| | | | inhibitory factor (Lif), mRNA. | | |
| | | | Length = 609 | | |
| 140 | 20385 | NM_022229 | Rattus norvegicus heat shock | heat shock protein 60 (liver) | h |
| | | | protein 60 (liver) (Hsp60), | | |
| | | | mRNA. Length = 2175 | | |
| 141 | 6263 | NM_022251 | Rattus norvegicus | Rattus norvegicus aminopeptidase | b |
| | | | aminopeptidase A (Enpep), | A short variant mRNA, partial cds | |
| | | | mRNA. Length = 4075 | | |
| 142 | 6585 | NM_022266 | Rattus norvegicus connective | connective tissue growth factor | i, General |
| | | | tissue growth factor (Ctgf), | | |
| | | | mRNA. Length = 2345 | | |
| 143 | 17161 | NM_022298 | Rattus norvegicus alpha-tubulin | alpha-tubulin | g, General |
| | | | (Tuba1), mRNA. Length = 1617 | | |
| 144 | 13480 | NM_022390 | Rattus norvegicus quinoid | quinoid dihydropteridine reductase | f |
| | | | dihydropteridine reductase | | |
| | | | (Qdpr), mRNA. Length = 1307 | | |
| 145 | 22415 | NM_022392 | Rattus norvegicus growth | growth response protein (CL-6) | General |
| | | | response protein (CL-6) | | |
| | | | (LOC64194), mRNA. Length = | | |
| | | | 2410 | | |
| 146 | 23705 | NM_022396 | Rattus norvegicus guanine | guanine nucleotide binding protein | h |
| | | | nucleotide binding protein | gamma subunit 11 | |
| | | | gamma subunit 11 (Gng11), | | |
| | | | mRNA. Length = 557 | | |
| 147 | 23300 | NM_022398 | Rattus norvegicus 2-oxoglutarate | 2-oxoglutarate carrier | h |
| | | | carrier (LOC64201), mRNA. | | |
| | | | Length = 946 | | |
| 148 | 24536 | NM_022399 | Rattus norvegicus calreticulin | calreticulin | c |
| | | | (Calr), mRNA. Length = 1882 | | |
| 149 | 20915 | NM_022407 | Rattus norvegicus Aldehyde | aldehyde dehydrogenase family 1, | General |
| | | | dehydrogenase 1, subfamily A1 | subfamily A1 | |
| | | | (Aldh1a1), mRNA. Length = | | |
| | | | 2012 | | |
| 150 | 8212 | NM_022500 | Rattus norvegicus ferritin light | ferritin light chain 1 | General |
| | | | chain 1 (Ftl1), mRNA. Length = | | |
| | | | 552 | | |
| 151 | 1867 | NM_022510 | Rattus norvegicus ribosomal | ribosomal protein L4 | General |
| | | | protein L4 (Rpl4), mRNA. | | |
| | | | Length = 1387 | | |
| 152 | 4242 | NM_022521 | Rattus norvegicus ornithine | ornithine aminotransferase | f |
| | | | aminotransferase (Oat), mRNA. | | |
| | | | Length = 1938 | | |
| 153 | 6100 | NM_022531 | Rattus norvegicus desmin (Des), | desmin | f, General |
| | | | mRNA. Length = 2169 | | |
| 154 | 8598 | NM_022538 | Rattus norvegicus phosphatidate | phosphatidate phosphohydrolase | f |
| | | | phosphohydrolase type 2 | type 2 | |
| | | | (Ppap2), mRNA. Length = 871 | | |
| 154 | 8597 | NM_022538 | Rattus norvegicus phosphatidate | phosphatidate phosphohydrolase | b, General |
| | | | phosphohydrolase type 2 | type 2 | |
| | | | (Ppap2), mRNA. Length = 871 | | |
| 155 | 11039 | NM_022543 | Rattus norvegicus steroid | steroid sensitive gene-1 protein | General |
| | | | sensitive gene-1 protein (Ssg1), | | |
| | | | mRNA. Length = 3719 | | |
| 156 | 20925 | NM_022594 | Rattus norvegicus enoyl | enoyl hydratase-like protein, | e |
| | | | hydratase-like protein, | peroxisomal | |
| | | | peroxisomal (Ech1), mRNA. | | |
| | | | Length = 1097 | | |
| 157 | 20944 | NM_022597 | Rattus norvegicus cathepsin B | cathepsin B | f, General |
| | | | (Ctsb), mRNA. Length = 1904 | | |
| 158 | 21211 | NM_022607 | Rattus norvegicus MIPP65 | MIPP65 protein | b, h |
| | | | protein (Mipp65), mRNA. | | |
| | | | Length = 1468 | | |
| 159 | 2250 | NM_022643 | Rattus norvegicus Testis-specific | ESTs, Highly similar to 0506206A | h |
| | | | histone 2b (Th2b), mRNA. | histone H2B [R. norvegicus] | |
| | | | Length = 470 | | |
| 160 | 12542 | NM_022647 | Rattus norvegicus histone 2b | ESTs, Highly similar to 0506206A | f |
| | | | (H2b), mRNA. Length = 378 | histone H2B [R. norvegicus] | |
| 161 | 15727 | NM_022953 | Rattus norvegicus Slit1 (Slit1), | Slit1 | General |
| | | | mRNA. Length = 4950 | | |
| 162 | 15729 | NM_022955 | Rattus norvegicus MEGF6 | MEGF6 | General |
| | | | (Egfl3), mRNA. Length = 5523 | | |
| 163 | 21239 | NM_024125 | Rattus norvegicus Liver | Liver activating protein (LAP, also | c, General |
| | | | activating protein (LAP, also NF- | NF-IL6, nuclear factor-IL6, | |
| | | | IL6, nuclear factor-IL6, | previously designated TCF5) | |
| | | | previously designated TCF5) | | |
| | | | (Cebpb), mRNA. Length = 1408 | | |
| 164 | 353 | NM_024127 | Rattus norvegicus DNA-damage- | DNA-damage-inducible transcript 1 | i |
| | | | inducible transcript 1 (Gadd45a), | | |
| | | | mRNA. Length = 711 | | |
| 165 | 17226 | NM_024131 | Rattus norvegicus D- | D-dopachrome tautomerase | General |
| | | | dopachrome tautomerase (Ddt), | | |
| | | | mRNA. Length = 628 | | |
| 166 | 24634 | NM_024137 | Rattus norvegicus human | human immunodeficiency virus type | General |
| | | | immunodeficiency virus type I | I enhancer-binding protein 2 | |
| | | | enhancer-binding protein 2 | | |
| | | | (Hivep2), mRNA. Length = 9731 | | |
| 166 | 24632 | NM_024137 | Rattus norvegicus human | human immunodeficiency virus type | a |
| | | | immunodeficiency virus type I | I enhancer-binding protein 2 | |
| | | | enhancer-binding protein 2 | | |
| | | | (Hivep2), mRNA. Length = 9731 | | |
| 167 | 22 | NM_024388 | Rattus norvegicus immediate | immediate early gene transcription | b |
| | | | early gene transcription factor | factor NGFI-B | |
| | | | NGFI-B (Nr4a1), mRNA. | | |
| | | | Length = 2488 | | |
| 168 | 9929 | NM_024392 | Rattus norvegicus peroxisomal | peroxisomal multifunctional enzyme | g |
| | | | multifunctional enzyme type II | type II | |
| | | | (Hsd17b4), mRNA. Length = | | |
| | | | 2535 | | |
| 169 | 3582 | NM_024396 | Rattus norvegicus ATP-binding | ATP-binding cassette, sub-family A | a |
| | | | cassette, sub-family A (ABC1), | (ABC1), member 2 | |
| | | | member 2 (Abca2), mRNA. | | |
| | | | Length = 8040 | | |
| 170 | 22626 | NM_024400 | Rattus norvegicus a disintegrin | a disintegrin and metalloproteinase | General |
| | | | and metalloproteinase with | with thrombospondin motifs 1 | |
| | | | thrombospondin motifs 1 | (ADAMTS-1) | |
| | | | (ADAMTS-1) (Adamts1), mRNA. | | |
| | | | Length = 4878 | | |
| 171 | 13633 | NM_024403 | Rattus norvegicus activating | activating transcription factor ATF-4 | General |
| | | | transcription factor ATF-4 (Atf4), | | |
| | | | mRNA. Length = 1173 | | |
| 171 | 13634 | NM_024403 | Rattus norvegicus activating | activating transcription factor ATF-4 | General |
| | | | transcription factor ATF-4 (Atf4), | | |
| | | | mRNA. Length = 1173 | | |
| 172 | 17917 | NM_024488 | Rattus norvegicus CDK5 | CDK5 activator-binding protein C53 | a, b |
| | | | activator-binding proteinC53 | | |
| | | | (C53), mRNA. Length = 1865 | | |
| 173 | 26164 | NM_030836 | Rattus norvegicus leucyl-specific | leucyl-specific aminopeptidase | i |
| | | | aminopeptidase PILS (APPILS), | PILS | |
| | | | mRNA. Length = 5042 | | |
| 174 | 1221 | NM_030845 | Rattus norvegicus gro (Gro1), | gro | General |
| | | | mRNA. Length = 929 | | |
| 175 | 17342 | NM_030873 | Rattus norvegicus profilin II | profilin II | d |
| | | | (Pfn2), mRNA. Length = 1966 | | |
| 176 | 23109 | NM_031000 | Rattus norvegicus aldo-keto | aldo-keto reductase family 1, | c, f, h |
| | | | reductase family 1, member A1 | member A1 (aldehyde reductase) | |
| | | | (aldehyde reductase) (Akr1a1), | | |
| | | | mRNA. Length = 1124 | | |
| 177 | 21165 | NM_031005 | Rattus norvegicus non-muscle | non-muscle alpha-actinin 1 | General |
| | | | alpha-actinin 1 (Actn1), mRNA. | | |
| | | | Length = 2956 | | |
| 178 | 1845 | NM_031010 | Rattus norvegicus arachidonate | arachidonate 12-lipoxygenase | a, b, |
| | | | 12-lipoxygenase (Alox12), | | General |
| | | | mRNA. Length = 2048 | | |
| 178 | 25517 | NM_031010 | Rattus norvegicus arachidonate | arachidonate 12-lipoxygenase | a, b, |
| | | | 12-lipoxygenase (Alox12), | | General |
| | | | mRNA. Length = 2048 | | |
| 179 | 15886 | NM_031035 | Rattus norvegicus GTP-binding | GTP-binding protein (G-alpha-i2) | c, f |
| | | | protein (G-alpha-i2) (Gnai2), | | |
| | | | mRNA. Length = 1748 | | |
| 180 | 15957 | NM_031050 | Rattus norvegicus lumican | lumican | h |
| | | | (Lum), mRNA. Length = 1740 | | |
| 181 | 11849 | NM_031065 | Rattus norvegicus ribosomal | ribosomal protein L10a | h, General |
| | | | protein L10a (Rpl10a), mRNA. | | |
| | | | Length = 710 | | |
| 182 | 12639 | NM_031099 | Rattus norvegicus ribosomal | ribosomal protein L5 | e, General |
| | | | protein L5 (Rpl5), mRNA. | | |
| | | | Length = 1069 | | |
| 183 | 20812 | NM_031100 | Rattus norvegicus ribosomal | ribosomal protein L10 | e |
| | | | protein L10 (Rpl10), mRNA. | | |
| | | | Length = 769 | | |
| 184 | 23854 | NM_031101 | Rattus norvegicus ribosomal | ribosomal protein L13 | General |
| | | | protein L13 (Rpl13), mRNA. | | |
| | | | Length = 722 | | |
| 185 | 16938 | NM_031103 | Rattus norvegicus ribosomal | ribosomal protein L19 | e |
| | | | protein L19 (Rpl19), mRNA. | | |
| | | | Length = 703 | | |
| 186 | 22205 | NM_031105 | Rattus norvegicus large subunit | large subunit ribosomal protein | h |
| | | | ribosomal protein L36a (Rpl36a), | L36a | |
| | | | mRNA. Length = 444 | | |
| 187 | 16847 | NM_031109 | Rattus norvegicus ribosomal | ribosomal protein S10 | g, General |
| | | | protein S10 (Rps10), mRNA. | | |
| | | | Length = 610 | | |
| 188 | 10878 | NM_031110 | Rattus norvegicus ribosomal | ribosomal protein S11 | e, General |
| | | | protein S11 (Rps11), mRNA. | | |
| | | | Length = 534 | | |
| 189 | 20839 | NM_031113 | Rattus norvegicus ribosomal | ribosomal protein S27a | General |
| | | | protein S27a (Rps27a), mRNA. | | |
| | | | Length = 552 | | |
| 190 | 22749 | NM_031116 | Rattus norvegicus small | small inducible cytokine A5 | b |
| | | | inducible cytokine A5 (RANTES) | (RANTES) | |
| | | | (Scya5), mRNA. Length = 279 | | |
| 191 | 1580 | NM_031117 | Rattus norvegicus small nuclear | small nuclear ribonucleoparticle- | h |
| | | | ribonucleoparticle-associated | associated protein (snRNP) mRNA, | |
| | | | protein (snRNP) mRNA, clone | clone Sm51 | |
| | | | Sm51 (Snrpn), mRNA. Length = | | |
| | | | 1428 | | |
| 192 | 13929 | NM_031131 | Rattus norvegicus TGF beta 2 | TGF beta 2 protein | General |
| | | | protein (Tgfb2), mRNA. Length = | | |
| | | | 2880 | | |
| 193 | 15185 | NM_031140 | Rattus norvegicus vimentin | vimentin | c, General |
| | | | (Vim), mRNA. Length = 1796 | | |
| 194 | 1638 | NM_031143 | Rattus norvegicus diacylglycerol | diacylglycerol kinase | General |
| | | | kinase (Dgkz), mRNA. Length = | | |
| | | | 3560 | | |
| 195 | 21624 | NM_031144 | Rattus norvegicus cytoplasmic | cytoplasmic beta-actin | g |
| | | | beta-actin (Actx), mRNA. | | |
| | | | Length = 1128 | | |
| 196 | 15277 | NM_031237 | Rattus norvegicus ubiquitin- | ubiquitin-conjugating enzyme E2D 3 | g, i, |
| | | | conjugating enzyme E2D 3 | (homologous to yeast UBC4/5) | General |
| | | | (homologous to yeast UBC4/5) | | |
| | | | (Ube2d3), mRNA. Length = 1531 | | |
| 197 | 18597 | NM_031325 | Rattus norvegicus UDP-glucose | UDP-glucose dehydrogeanse | General |
| | | | dehydrogeanse (Ugdh), mRNA. | | |
| | | | Length = 2318 | | |
| 198 | 11258 | NM_031327 | Rattus norvegicus cysteine rich | cysteine rich protein 61 | General |
| | | | protein 61 (Cyr61), mRNA. | | |
| | | | Length = 1871 | | |
| 199 | 18654 | NM_031358 | Rattus norvegicus potassium | potassium inwardly-rectifying | i, General |
| | | | inwardly-rectifying channel, | channel, subfamily J, member 11 | |
| | | | subfamily J, member 11 | | |
| | | | (Kcnj11), mRNA. Length = 2227 | | |
| 200 | 12581 | NM_031514 | Rattus norvegicus Janus kinase | Janus kinase 2 (a protein tyrosine | i, General |
| | | | 2 (a protein tyrosine kinase) | kinase) | |
| | | | (Jak2), mRNA. Length = 3731 | | |
| 201 | 20449 | NM_031530 | Rattus norvegicus Small | Small inducible gene JE | g, General |
| | | | inducible gene JE (Scya2), | | |
| | | | mRNA. Length = 780 | | |
| 201 | 20448 | NM_031530 | Rattus norvegicus Small | Small inducible gene JE | g |
| | | | inducible gene JE (Scya2), | | |
| | | | mRNA. Length = 780 | | |
| 202 | 445 | NM_031535 | Rattus norvegicus B cell | B cell lymphoma 2 like, ESTs, | b |
| | | | lymphoma 2 like (Bcl2l), mRNA. | Moderately similar to acetolactate | |
| | | | Length = 1748 | synthase homolog [H. sapiens] | |
| 203 | 4011 | NM_031543 | Rattus norvegicus Cytochrome | Cytochrome P450, subfamily 2e1 | a |
| | | | P450, subfamily 2e1 (ethanol- | (ethanol-inducible) | |
| | | | inducible) (Cyp2e1), mRNA. | | |
| | | | Length = 1624 | | |
| 204 | 18389 | NM_031545 | Rattus norvegicus Brain | Brain natriuretic factor | i, General |
| | | | natriuretic factor (Nppb), mRNA. | | |
| | | | Length = 628 | | |
| 205 | 692 | NM_031557 | Rattus norvegicus Prostaglandin | Prostaglandin I2 (prostacyclin) | h |
| | | | I2 (prostacyclin) synthase | synthase | |
| | | | (Ptgis), mRNA. Length = 1618 | | |
| 206 | 18318 | NM_031561 | Rattus norvegicus CD36 antigen | CD36 antigen (collagen type I | h |
| | | | (collagen type I receptor, | receptor, thrombospondin receptor) | |
| | | | thrombospondin receptor) | | |
| | | | (Cd36), mRNA. Length = 2436 | | |
| 207 | 24219 | NM_031579 | Rattus norvegicus protein | protein tyrosine phosphatase 4a1 | General |
| | | | tyrosine phosphatase 4a1 | | |
| | | | (Ptp4a1), mRNA. Length = 2638 | | |
| 208 | 24235 | NM_031614 | Rattus norvegicus thioredoxin | thioredoxin reductase 1 | General |
| | | | reductase 1 (Txnrd1), mRNA. | | |
| | | | Length = 3360 | | |
| 209 | 567 | NM_031628 | Rattus norvegicus nuclear | nuclear receptor subfamily 4, group | General |
| | | | receptor subfamily 4, group A, | A, member 3 | |
| | | | member 3 (Nr4a3), mRNA. | | |
| | | | Length = 4400 | | |
| 210 | 211 | NM_031664 | Rattus norvegicus solute carrier | solute carrier family 28 (sodium- | c |
| | | | family 28 (sodium-coupled | coupled nucleoside transporter), | |
| | | | nucleoside transporter), member | member 2 | |
| | | | 2 (Slc28a2), mRNA. Length = | | |
| | | | 2881 | | |
| 211 | 18403 | NM_031677 | Rattus norvegicus four and a half | four and a half LIM domains 2 | g |
| | | | LIM domains 2 (Fhl2), mRNA. | | |
| | | | Length = 840 | | |
| 212 | 20743 | NM_031684 | Rattus norvegicus solute carrier | solute carrier family 29 (nucleoside | f, g, |
| | | | family 29 (nucleoside | transporters), member 1 | General |
| | | | transporters), member 1 | | |
| | | | (Slc29a1), mRNA. Length = 1766 | | |
| 213 | 21575 | NM_031698 | Rattus norvegicus ribophorin II | ribophorin II | b |
| | | | (Rpn2), mRNA. Length = 2234 | | |
| 214 | 16918 | NM_031709 | Rattus norvegicus ribosomal | ribosomal protein S12 | e, General |
| | | | protein S12 (Rps12), mRNA. | | |
| | | | Length = 499 | | |
| 215 | 19050 | NM_031719 | Rattus norvegicus chloride | chloride channel current inducer | General |
| | | | channel, nucleotide-sensitive, 1A | | |
| | | | (Clns1a), mRNA. Length = 1399 | | |
| 215 | 19048 | NM_031719 | Rattus norvegicus chloride | chloride channel current inducer | f |
| | | | channel, nucleotide-sensitive, 1A | | |
| | | | (Clns1a), mRNA. Length = 1399 | | |
| 216 | 3549 | NM_031723 | Rattus norvegicus signal | signal peptidase complex (18 kD) | h |
| | | | peptidase complex (18 kD) | | |
| | | | (Spc18), mRNA. Length = 643 | | |
| 217 | 14184 | NM_031776 | Rattus norvegicus guanine | guanine deaminase | General |
| | | | deaminase (Gda), mRNA. | | |
| | | | Length = 1568 | | |
| 217 | 14185 | NM_031776 | Rattus norvegicus guanine | guanine deaminase | General |
| | | | deaminase (Gda), mRNA. | | |
| | | | Length = 1568 | | |
| 218 | 1169 | NM_031789 | Rattus norvegicus NF-E2-related | NF-E2-related factor 2 | a |
| | | | factor 2 (Nfe2l2), mRNA. | | |
| | | | Length = 2307 | | |
| 219 | 17195 | NM_031814 | Rattus norvegicus G protein- | G protein-coupled receptor kinase- | g |
| | | | coupled receptor kinase- | associated ADP ribosylation factor | |
| | | | associated ADP ribosylation | GTPase-activating protein (GIT1) | |
| | | | factor GTPase-activating protein | | |
| | | | (GIT1) (Git1), mRNA. Length = | | |
| | | | 3236 | | |
| 220 | 17535 | NM_031816 | Rattus norvegicus | retinoblastoma binding protein 7 | h |
| | | | retinoblastoma binding protein 7 | | |
| | | | (Rbbp7), mRNA. Length = 1947 | | |
| 221 | 15840 | NM_031817 | Rattus norvegicus osteomodulin | osteomodulin (osteoadherin) | g, General |
| | | | (osteoadherin) (Omd), mRNA. | | |
| | | | Length = 1536 | | |
| 222 | 2655 | NM_031821 | Rattus norvegicus serum- | serum-inducible kinase | i |
| | | | inducible kinase (Snk), mRNA. | | |
| | | | Length = 2781 | | |
| 223 | 3251 | NM_031825 | Rattus norvegicus fibrillin-1 | fibrillin-1 | b |
| | | | (Fbn1), mRNA. Length = 8942 | | |
| 223 | 3252 | NM_031825 | Rattus norvegicus fibrillin-1 | fibrillin-1 | c |
| | | | (Fbn1), mRNA. Length = 8942 | | |
| 224 | 22321 | NM_031832 | Rattus norvegicus IgE binding | IgE binding protein | g, General |
| | | | protein (Lgals3), mRNA. | | |
| | | | Length = 948 | | |
| 225 | 4749 | NM_031834 | Rattus norvegicus | minoxidil sulfotransferase | c, d |
| | | | sulfotransferase family 1A, | | |
| | | | phenol-preferring, member 1 | | |
| | | | (Sult1a1), mRNA. Length = 1227 | | |
| 226 | 15603 | NM_031851 | Rattus norvegicus Prohibitin | Prohibitin | i |
| | | | (Phb), mRNA. Length = 1688 | | |
| 227 | 22300 | NM_031967 | Rattus norvegicus development- | development-related protein | c |
| | | | related protein (AF045564), | | |
| | | | mRNA. Length = 2718 | | |
| 228 | 17735 | NM_031970 | Rattus norvegicus Heat shock 27 | ESTs, Heat shock 27 kDa protein | g, i, |
| | | | kDa protein (Hsp27), | | General |
| | | | mRNA. Length = 787 | | |
| 228 | 17734 | NM_031970 | Rattus norvegicus Heat shock 27 | ESTs, Heat shock 27 kDa protein | g, i, |
| | | | kDa protein (Hsp27), | | General |
| | | | mRNA. Length = 787 | | |
| 228 | 17736 | NM_031970 | Rattus norvegicus Heat shock 27 | ESTs, Heat shock 27 kDa protein | f, g, i |
| | | | kDa protein (Hsp27), | | General |
| | | | mRNA. Length = 787 | | |
| 229 | 18500 | NM_031984 | Rattus norvegicus cerebellar Ca- | cerebellar Ca-binding protein, spot | c |
| | | | binding protein, spot 35 protein | 35 protein | |
| | | | (Calb1), mRNA. Length = 2280 | | |
| 230 | 18899 | NM_031985 | Rattus norvegicus S6 kinase | S6 kinase | a |
| | | | (Rps6kb1), mRNA. Length = | | |
| | | | 2287 | | |
| 231 | 19768 | NM_031986 | Rattus norvegicus syntenin | syntenin | i |
| | | | (Sdcbp), mRNA. Length = 2077 | | |
| 232 | 17829 | NM_033234 | Rattus norvegicus Hemoglobin, | Rat major beta-globin mRNA, | a, c |
| | | | beta (Hbb), mRNA. Length = 620 | complete cds | |
| 232 | 25468 | NM_033234 | Rattus norvegicus Hemoglobin, | | a, b |
| | | | beta (Hbb), mRNA. Length = 620 | | |
| 232 | 25469 | NM_033234 | Rattus norvegicus Hemoglobin, | | a, b, |
| | | | beta (Hbb), mRNA. Length = 620 | | General |
| 232 | 17832 | NM_033234 | Rattus norvegicus Hemoglobin, | Rat major beta-globin mRNA, | a, b, |
| | | | beta (Hbb), mRNA. Length = 620 | complete cds | General |
| 233 | 12364 | NM_033351 | Rattus norvegicus Fc receptor, | Rat MHC class I lgG Fc region | General |
| | | | lgG, alpha chain transporter | receptor large subunit p51 (FcRn) | |
| | | | (Fcgrt), mRNA. Length = 1552 | mRNA, complete cds | |
| 234 | 11714 | NM_033352 | Rattus norvegicus ATP-binding | ESTs | General |
| | | | cassette, sub-family D (ALD), | | |
| | | | member 2 (Abcd2), mRNA. | | |
| | | | Length = 5531 | | |
| 235 | 15867 | NM_053289 | Rattus norvegicus Pancreatitis- | ESTs, Weakly similar to T15062 | General |
| | | | associated protein 1 (Pap1), | hypothetical protein R02D3.2 - | |
| | | | mRNA. Length = 781 | Caenorhabditis elegans | |
| | | | | [C. elegans], Rattus norvegicus | |
| | | | | pancreatitis-associated protein | |
| | | | | precursor (pap) mRNA, complete | |
| | | | | cds | |
| 236 | 4093 | NM_053290 | Rattus norvegicus | R. norvegicus phosphoglycerate | General |
| | | | Phosphoglycerate mutase 1 | mutase B isozyme (PGAM) mRNA, | |
| | | | (Pgam1), mRNA. Length = 1754 | complete cds | |
| 237 | 16886 | NM_053291 | Rattus norvegicus | ESTs, Highly similar to PGK2 RAT | c |
| | | | phosphoglycerate kinase 1 | PHOSPHOGLYCERATE KINASE, | |
| | | | (Pgk1), mRNA. Length = 1675 | TESTIS SPECIFIC [R. norvegicus] | |
| 238 | 14928 | NM_053330 | Rattus norvegicus ribosomal | Rattus norvegicus ribosomal protein | e, h |
| | | | protein L21 (Rpl21), mRNA. | L21 mRNA, complete cds | |
| | | | Length = 554 | | |
| 239 | 1609 | NM_053338 | Rattus norvegicus Ras-related | Rattus norvegicus ras-related | c, General |
| | | | associated with diabetes (Rrad), | protein (rad) mRNA, complete cds | |
| | | | mRNA. Length = 1421 | | |
| 240 | 9353 | NM_053347 | Rattus norvegicus nuclear | Rattus norvegicus LIS1-interacting | General |
| | | | distribution gene E homolog | protein NUDE1 (Nude1) mRNA, | |
| | | | (Aspergillus) (Nude), mRNA. | complete cds | |
| | | | Length = 2153 | | |
| 241 | 6155 | NM_053356 | Rattus norvegicus procollagen, | procollagen, type I, alpha 2 | e |
| | | | type I, alpha 2 (Col1a2), mRNA. | | |
| | | | Length = 4474 | | |
| 241 | 6156 | NM_053356 | Rattus norvegicus procollagen, | procollagen, type I, alpha 2 | e |
| | | | type I, alpha 2 (Col1a2), mRNA. | | |
| | | | Length = 4474 | | |
| 242 | 16017 | NM_053401 | Rattus norvegicus brain | brain expressed X-linked 3 | i |
| | | | expressed X-linked 3 (Bex3), | | |
| | | | mRNA. Length = 519 | | |
| 243 | 2242 | NM_053433 | Rattus norvegicus flavin- | flavin-containing monooxygenase 3 | d, General |
| | | | containing monooxygenase 3 | | |
| | | | (Fmo3), mRNA. Length = 2037 | | |
| 244 | 8085 | NM_053453 | Rattus norvegicus regulator of G- | regulator of G-protein signaling | General |
| | | | protein signaling protein 2 | protein 2 | |
| | | | (Rgs2), mRNA. Length = 1629 | | |
| 245 | 11403 | NM_053464 | Rattus norvegicus spermidine | spermidine synthase | General |
| | | | synthase (Srm), mRNA. | | |
| | | | Length = 1268 | | |
| 246 | 23276 | NM_053467 | Rattus norvegicus integral | integral membrane protein Tmp21-I | General |
| | | | membrane protein Tmp21-I (p23) | (p23) | |
| | | | (Tmp21), mRNA. Length = 1314 | | |
| 247 | 15556 | NM_053483 | Rattus norvegicus karyopherin | karyopherin (importin) alpha 2 | General |
| | | | (importin) alpha 2 (Kpna2), | | |
| | | | mRNA. Length = 1886 | | |
| 248 | 16394 | NM_053485 | Rattus norvegicus calcium | calcium binding protein A6 | General |
| | | | binding protein A6 (calcyclin) | (calcyclin) | |
| | | | (S100a6), mRNA. Length = 291 | | |
| 249 | 18826 | NM_053523 | Rattus norvegicus homocysteine- | Rattus norvegicus SUP mRNA, | c |
| | | | inducible, endoplasmic reticulum | complete cds | |
| | | | stress-inducible, ubiquitin-like | | |
| | | | domain member 1 (Herpud1), | | |
| | | | mRNA. Length = 1857 | | |
| 250 | 14380 | NM_053536 | Rattus norvegicus Kruppel-like | Rattus norvegicus mRNA for | General |
| | | | factor 15 (kidney) (KIf15), mRNA. | Kruppel-like transcription factor, | |
| | | | Length = 2458 | complete cds | |
| 251 | 15708 | NM_053565 | Rattus norvegicus cytokine | Rattus norvegicus suppressor of | General |
| | | | inducible SH2-containing protein | cytokine signaling-3 (SOCS-3) | |
| | | | 3 (Cish3), mRNA. Length = 863 | mRNA, complete cds | |
| 252 | 3050 | NM_053582 | Rattus norvegicus glucocorticoid- | Rattus norvegicus gis5 mRNA for | d, General |
| | | | inducible protein (gis5), mRNA. | glucocorticoid-inducible protein, | |
| | | | Length = 1869 | complete cds | |
| 252 | 3049 | NM_053582 | Rattus norvegicus glucocorticoid- | Rattus norvegicus gis5 mRNA for | d, General |
| | | | inducible protein (gis5), mRNA. | glucocorticoid-inducible protein, | |
| | | | Length = 1869 | complete cds | |
| 253 | 21709 | NM_053596 | Rattus norvegicus endothelin- | Rat mRNA for endothelin- | General |
| | | | converting enzyme 1 (Ece1), | converting enzyme, complete cds | |
| | | | mRNA. Length = 4469 | | |
| 254 | 2103 | NM_053597 | Rattus norvegicus ribosomal | Rattus norvegicus ribosomal protein | e, h |
| | | | protein S27 (Rps27), mRNA. | S271 (S27-1) mRNA, complete cds | |
| | | | Length = 336 | | |
| 255 | 7580 | NM_053603 | Rattus norvegicus chloride | Rattus norvegicus chloride | General |
| | | | intracellular channel 5 (Clic5), | intracellular channel 5 mRNA, | |
| | | | mRNA. Length = 2140 | complete cds | |
| 256 | 20243 | NM_053615 | Rattus norvegicus casein kinase | Rattus norvegicus casein kinase 1 | h |
| | | | 1, alpha 1 (Csnk1a1), mRNA. | alpha (CKIa) mRNA, complete cds | |
| | | | Length = 978 | | |
| 257 | 13005 | NM_053623 | Rattus norvegicus fatty acid- | Rattus norvegicus mRNA for Acyl- | General |
| | | | Coenzyme A ligase, long chain 4 | CoA synthetase, complete cds | |
| | | | (Facl4), mRNA. Length = 4862 | | |
| 258 | 18644 | NM_053648 | Rattus norvegicus beta-carotene | Rattus norvegicus mRNA for beta- | c |
| | | | 15, 15′-dioxygenase (Bcdo), | carotene 15, 15′-dioxygenase, | |
| | | | mRNA. Length = 2207 | complete cds | |
| 259 | 6684 | NM_053703 | Rattus norvegicus mitogen- | Rattus norvegicus mitogen- | General |
| | | | activated protein kinase kinase 6 | activated protein kinase kinase 6 | |
| | | | (Map2k6), mRNA. Length = 1690 | (Mkk6) mRNA, complete cds | |
| 260 | 25379 | NM_053713 | Rattus norvegicus Kruppel-like | | d, General |
| | | | factor 4 (gut) (Klf4), mRNA. | | |
| | | | Length = 2393 | | |
| 260 | 22411 | NM_053713 | Rattus norvegicus Kruppel-like | ESTs | d |
| | | | factor 4 (gut) (Klf4), mRNA. | | |
| | | | Length = 2393 | | |
| 261 | 1218 | NM_053748 | Rattus norvegicus | Rattus norvegicus mRNA for | e, General |
| | | | dipeptidylpeptidase III (Dpp3), | dipeptidyl peptidase III, complete | |
| | | | mRNA. Length = 2632 | cds | |
| 262 | 9059 | NM_053783 | Rattus norvegicus interferon | Rattus norvegicus interferon- | g, General |
| | | | gamma receptor (Ifngr), mRNA. | gamma receptor mRNA, complete | |
| | | | Length = 1860 | cds | |
| 263 | 15103 | NM_053814 | Rattus norvegicus Rho | Rattus norvegicus P116RIP mRNA, | h |
| | | | interacting protein 3 (Rhoip3), | complete cds | |
| | | | mRNA. Length = 3286 | | |
| 264 | 15002 | NM_053819 | Rattus norvegicus tissue inhibitor | Rattus norvegicus tissue inhibitor of | f, g, |
| | | | of metalloproteinase 1 (Timp1), | metalloproteinase-1 (TIMP1), | General |
| | | | mRNA. Length = 740 | mRNA, complete cds | |
| 264 | 15003 | NM_053819 | Rattus norvegicus tissue inhibitor | Rattus norvegicus tissue inhibitor of | f, g, |
| | | | of metalloproteinase 1 (Timp1), | metalloproteinase-1 (TIMP1), | General |
| | | | mRNA. Length = 740 | mRNA, complete cds | |
| 265 | 17155 | NM_053835 | Rattus norvegicus clathrin, light | Rat clathrin light chain (LCB2) | e |
| | | | polypeptide (Lcb) (Cltb), mRNA. | mRNA, complete cds, Rat clathrin | |
| | | | Length = 982 | light chain (LCB3) mRNA, complete | |
| | | | | cds | |
| 266 | 20868 | NM_053843 | Rattus norvegicus Fc receptor, | Rat Fc-gamma receptor mRNA, | General |
| | | | IgG, low affinity III (Fcgr3), | complete cds | |
| | | | mRNA. Length = 1318 | | |
| 266 | 20869 | NM_053843 | Rattus norvegicus Fc receptor, | Rat Fc-gamma receptor mRNA, | General |
| | | | IgG, low affinity III (Fcgr3), | complete cds | |
| | | | mRNA. Length = 1318 | | |
| 267 | 1571 | NM_053857 | Rattus norvegicus eukaryotic | Rattus norvegicus Sprague/Dawley | d, General |
| | | | translation initiation factor 4E | PHAS-I mRNA, complete cds | |
| | | | binding protein 1 (Eif4ebp1), | | |
| | | | mRNA. Length = 843 | | |
| 268 | 18358 | NM_053864 | Rattus norvegicus valosin- | Rattus norvegicus transitional | h |
| | | | containing protein (Vcp), mRNA. | endoplasmic reticulum ATPase | |
| | | | Length = 2870 | mRNA, complete cds | |
| 269 | 17728 | NM_053867 | Rattus norvegicus tumor protein, | Rattus norvegicus lens epithelial | a, b |
| | | | translationally-controlled 1 | protein mRNA, complete cds | |
| | | | (Tpt1), mRNA. Length = 794 | | |
| 270 | 19781 | NM_053883 | Rattus norvegicus dual | Rattus norvegicus dual-specificity | General |
| | | | specificity phosphatase 6 | protein tyrosine phosphatase | |
| | | | (Dusp6), mRNA. Length = 2104 | (rVH6) mRNA, complete cds | |
| 271 | 385 | NM_053885 | Rattus norvegicus arginine- | Rattus norvegicus atrophin-1 | i, General |
| | | | glutamic acid dipeptide (RE) | related protein (rARP) mRNA, | |
| | | | repeats (Rere), mRNA. Length = | complete cds | |
| | | | 6659 | | |
| 272 | 1288 | NM_053949 | Rattus norvegicus potassium | Rattus norvegicus mRNA for | General |
| | | | voltage-gated channel, subfamily | potassium channel r-ERG | |
| | | | H (eag-related), member 2 | | |
| | | | (Kcnh2), mRNA. Length = 3889 | | |
| 273 | 19774 | NM_053961 | Rattus norvegicus endoplasmic | ESTs, Moderately similar to S12207 | a |
| | | | retuclum protein 29 (Erp29), | hypothetical protein [M. musculus] | |
| | | | mRNA. Length = 4529 | | |
| 274 | 16546 | NM_053965 | Rattus norvegicus solute carrier | R. norvegicus mRNA for | General |
| | | | family 25 (carnitine/acylcarnitine | carnitine/acylcarnitine carrier | |
| | | | translocase), member 20 | protein | |
| | | | (Slc25a20), mRNA. Length = | | |
| | | | 1231 | | |
| 275 | 19544 | NM_053982 | Rattus norvegicus ribosomal | EST, Moderately similar to | General |
| | | | protein S15a (Rps15a), mRNA. | RS1A_HUMAN 40S RIBOSOMAL | |
| | | | Length = 449 | PROTEIN S15A [R. norvegicus] | |
| 276 | 15642 | NM_053985 | Rattus norvegicus H3 histone, | R. norvegicus mRNA for histone | General |
| | | | family 3B (H3f3b), mRNA. | H3.3 | |
| | | | Length = 1107 | | |
| 277 | 17739 | NM_053995 | Rattus norvegicus 3- | Sprague-Dawley D-beta- | e |
| | | | hydroxybutyrate dehydrogenase | hydroxybutyrate dehydrogenase | |
| | | | (heart, mitochondrial) (Bdh), | mRNA, complete cds | |
| | | | mRNA. Length = 1420 | | |
| 278 | 17329 | NM_054008 | Rattus norvegicus Rgc32 protein | Rattus norvegicus RGC-32 (RGC- | General |
| | | | (Rgc32), mRNA. Length = 889 | 32) mRNA, complete cds | |
| 279 | 19658 | NM_057103 | Rattus norvegicus A kinase | Rattus norvegicus PKC binding | General |
| | | | (PRKA) anchor protein (gravin) | protein and substrate mRNA, | |
| | | | 12 (Akap12), mRNA. Length = | complete cds | |
| | | | 5236 | | |
| 280 | 968 | NM_057133 | Rattus norvegicus nuclear | Rattus norvegicus mRNA for small | h |
| | | | receptor subfamily 0, group B, | heterodimer partner homolog, | |
| | | | member 2 (Nr0b2), mRNA. | complete cds | |
| | | | Length = 1111 | | |
| 281 | 2413 | NM_057141 | Rattus norvegicus | Rattus norvegicus mRNA for dC- | e, h |
| | | | heterogeneous nuclear | stretch binding protein (CSBP), | |
| | | | ribonucleoprotein K (Hnrpk), | complete cds | |
| | | | mRNA. Length = 2563 | | |
| 281 | 2416 | NM_057141 | Rattus norvegicus | Rattus norvegicus mRNA for dC- | d |
| | | | heterogeneous nuclear | stretch binding protein (CSBP), | |
| | | | ribonucleoprotein K (Hnrpk), | complete cds | |
| | | | mRNA. Length = 2563 | | |
| 282 | 1892 | NM_057144 | Rattus norvegicus cysteine-rich | R. norvegicus mRNA for muscle LIM | g, i, |
| | | | protein 3 (Csrp3), mRNA. | protein | General |
| | | | Length = 853 | | |
| 283 | 17477 | NM_057194 | Rattus norvegicus phospholipid | Rattus norvegicus phospholipid | g, General |
| | | | scramblase 1 (Plscr1), mRNA. | scramblase PLSCR mRNA, | |
| | | | Length = 1569 | complete cds | |
| 284 | 14126 | NM_057208 | Rattus norvegicus tropomyosin | Rattus norvegicus tropomyosin non- | g |
| | | | 3, gamma (Tpm3), mRNA. | muscle isoform NM1 (TPM-gamma) | |
| | | | Length = 1101 | mRNA, complete cds, Rattus | |
| | | | | norvegicus tropomyosin non-muscle | |
| | | | | isoform NM3 (TPM-gamma) mRNA, | |
| | | | | complete cds | |
| 285 | 8641 | NM_057211 | Rattus norvegicus Kruppel-like | Rattus norvegicus mRNA for BTE | c |
| | | | factor 9 (Klf9), mRNA. Length = | binding protein, complete cds | |
| | | | 2721 | | |
| 286 | 10498 | NM_078617 | Rattus norvegicus ribosomal | R. norvegicus (Sprague-Dawley) | e, f |
| | | | protein S23 (Rps23), mRNA. | ribosomal protein S23 mRNA | |
| | | | Length = 432 | | |
| 287 | 20392 | NM_080477 | Rattus norvegicus 6- | R. norvegicus mRNA for 6- | General |
| | | | Phosphofructo-2-kinase/fructose- | phosphofructo-2-kinase/6- | |
| | | | 2,6-bisphosphatase 2 (heart) | phosphofructo-2-kinase exons | |
| | | | (Pfkfb2), mRNA. Length = 2537 | 1a′, 1b, 1c, 1d | |
| 288 | 23033 | NM_080888 | Rattus norvegicus | ESTs, Highly similar to NIPL | b, General |
| | | | BCL2/adenovirus E1B 19 kDa- | MOUSE BCL2/ADENOVIRUS E1B | |
| | | | interacting protein 3-like (Bnip3l), | 19-KDA PROTEIN-INTERACTING | |
| | | | mRNA. Length = 3219 | PROTEIN 3 LIKE [M. musculus] | |
| 289 | 15843 | NM_080910 | Rattus norvegicus | Rat AIRC mRNA for AIR | h |
| | | | phosphoribosylaminoimidazole | carboxylase-SAICAR synthetase, | |
| | | | carboxylase, | complete cds | |
| | | | phosphoribosylaminoribosylamin | | |
| | | | oimidazole succinocarboxamide | | |
| | | | synthetase (Paics), mRNA. | | |
| | | | Length = 1329 | | |
| 290 | 21391 | NM_130416 | Rattus norvegicus annexin A7 | ESTs, Weakly similar to ANX4 RAT | General |
| | | | (Anxa7), mRNA. Length = 2912 | ANNEXIN IV [R. norvegicus] | |
| 291 | 25094 | X77117 | | | c |
| 292 | 11663 | AA800803 | | ESTs, Weakly similar to | General |
| | | | | YNP5_CAEEL HYPOTHETICAL | |
| | | | | 28.3 KD PROTEIN T05G5.5 IN | |
| | | | | CHROMOSOME III [C. elegans] | |
| 293 | 25717 | X61296 | | | i |
| 294 | 5292 | AI171607 | | ESTs | d, General |
| 295 | 23998 | AI230578 | | ESTs | General |
| 296 | 5186 | AA925674 | | ESTs | d, General |
| 297 | 1754 | AA817837 | | ESTs | General |
| 298 | 6438 | AA819269 | | ESTs | General |
| 299 | 6059 | AI178245 | | ESTs, Moderately similar to | b, General |
| | | | | C17orf1 protein [H. sapiens] | |
| 300 | 18663 | U95052 | | ESTs, Weakly similar to S49172 | h |
| | | | | translation initiation factor elF-4 | |
| | | | | gamma [H. sapiens] | |
| 301 | 7414 | AI137586 | | ESTs, Highly similar to | g, General |
| | | | | IMB3_HUMAN | |
| | | | | IMPORTIN BETA-3 | |
| | | | | SUBUNIT [H. sapiens] | |
| 302 | 10019 | AI178756 | | ESTs | d, h |
| 303 | 6226 | AA818521 | | ESTs | General |
| 304 | 15571 | M27207 | | R. norvegicus mRNA for collagen | e, h |
| | | | | alpha1 type I | |
| 305 | 15089 | AI009752 | | ESTs | g |
| 306 | 17214 | AI639008 | | ESTs | a |
| 307 | 6073 | AA818818 | | EST | a |
| 308 | 17781 | AI175474 | | ESTs | a |
| 309 | 22386 | AA800844 | | ESTs, Moderately similar to LYOX | e |
| | | | | RAT PROTEIN-LYSINE 6- | |
| | | | | OXIDASE PRECURSOR | |
| | | | | [R. norvegicus] | |
| 310 | 24765 | AA900050 | | ESTs, Highly similar to | h |
| | | | | R37A_HUMAN 60S RIBOSOMAL | |
| | | | | PROTEIN L37 [R. norvegicus] | |
| 311 | 20984 | D90109 | Acyl CoA synthetase, long chain | Acyl CoA synthetase, long chain | h |
| 312 | 22873 | AA923945 | | ESTs, Weakly similar to | i, General |
| | | | | procollagen-lysine 5-dioxygenase | |
| | | | | [R. norvegicus] | |
| 313 | 2341 | AI012144 | | ESTs | a, General |
| 314 | 4861 | AA901290 | | ESTs | General |
| 315 | 22796 | AI072213 | | ESTs | General |
| 316 | 15935 | AA866345 | | ESTs | General |
| 317 | 16038 | AI177372 | | ESTs, Moderately similar to MPL3 | h |
| | | | | RAT MICROTUBULE- | |
| | | | | ASSOCIATED PROTEINS 1A/1B | |
| | | | | LIGHT CHAIN 3 [R. norvegicus] | |
| 318 | 15212 | AI229753 | ADP-ribosylation factor 2 | ADP-ribosylation factor 2 | d, General |
| 319 | 23157 | AI172489 | | ESTs, Moderately similar to STRI | a |
| | | | | RAT STRIATIN [R. norvegicus] | |
| 320 | 4710 | AI168973 | | ESTs, Weakly similar to phosducin- | General |
| | | | | like protein [R. norvegicus] | |
| 321 | 22697 | AA945996 | | ESTs | b, General |
| 322 | 15892 | AI179988 | | ESTs | a, General |
| 323 | 11404 | AI237002 | spermidine synthase | spermidine synthase | g, General |
| 324 | 23596 | AI105435 | HMm: glutaryl-Coenzyme A | ESTs, Highly similar to GCDH | c, General |
| | | | dehydrogenase | MOUSE GLUTARYL-COA | |
| | | | | DEHYDROGENASE PRECURSOR | |
| | | | | [M. musculus] | |
| 325 | 15841 | AI103465 | | ESTs, Moderately similar to | d, g, |
| | | | | ribonuclease P protein subunit p29 | General |
| | | | | [H. sapiens] | |
| 326 | 7220 | AI013098 | | ESTs | d |
| 327 | 20647 | AI639402 | | ESTs | b |
| 328 | 10829 | AI044467 | | EST | c, f |
| 329 | 22043 | AA943738 | | ESTs | f |
| 330 | 2936 | AI229843 | | ESTs, Highly similar to TNF- | General |
| | | | | induced protein GG2-1 [H. sapiens] | |
| 331 | 26133 | AI009950 | | | e |
| 332 | 5867 | AA858953 | HHs: asparaginyl-tRNA | ESTs, Highly similar to | General |
| | | | synthetase | SYN_HUMAN ASPARAGINYL- | |
| | | | | TRNA SYNTHETASE, | |
| | | | | CYTOPLASMIC [H. sapiens] | |
| 333 | 3278 | AI008988 | | ESTs, Highly similar to breakpoint | General |
| | | | | cluster region protein [H. sapiens] | |
| 334 | 21101 | AI175789 | smooth muscle alpha-actin | smooth muscle alpha-actin | g |
| 335 | 12613 | H31620 | | ESTs, Highly similar to hypothetical | General |
| | | | | protein [H. sapiens] | |
| 336 | 6927 | AI010542 | | ESTs | h |
| 337 | 8789 | AI070073 | | ESTs | h |
| 338 | 22995 | AI232047 | | ESTs | General |
| 339 | 5129 | AA925335 | | ESTs | d |
| 340 | 12462 | AI175421 | | ESTs | General |
| 341 | 1760 | U25281 | | Rattus norvegicus SH3 domain | General |
| | | | | binding protein (CR16) mRNA, | |
| | | | | complete cds | |
| 342 | 24521 | AA945636 | | ESTs, Highly similar to 60S ACIDIC | e |
| | | | | RIBOSOMAL PROTEIN P1 | |
| | | | | [R. norvegicus] | |
| 343 | 25354 | L13025 | | | e |
| 344 | 24272 | AA955948 | | Rattus norvegicus | General |
| | | | | deoxyribonuclease II mRNA, | |
| | | | | complete cds | |
| 345 | 18160 | AA799448 | | ESTs | h |
| 346 | 11738 | AI104213 | | ESTs | General |
| 347 | 15644 | AI010256 | | R. norvegicus mRNA for histone | General |
| | | | | H3.3 | |
| 348 | 10971 | AI073212 | | ESTs | e |
| 349 | 23578 | AA955042 | | ESTs, Weakly similar to folate | General |
| | | | | binding protein [R. norvegicus] | |
| 350 | 6217 | AI230381 | | ESTs | General |
| 351 | 21514 | AA851660 | | ESTs | General |
| 352 | 16909 | AA942704 | | ESTs, Moderately similar to SUR2 | e |
| | | | | MOUSE SURFEIT LOCUS | |
| | | | | PROTEIN 2 [M. musculus] | |
| 353 | 21284 | AI170842 | | ESTs, Weakly similar to CARP | General |
| | | | | [R. norvegicus] | |
| 354 | 23645 | AI144653 | | Rattus norvegicus G protein-binding | General |
| | | | | protein CRFG (Crfg) mRNA, | |
| | | | | complete cds | |
| 355 | 8230 | AI059117 | | ESTs | General |
| 356 | 9720 | AI071727 | | EST | g |
| 357 | 24012 | AA957335 | | ESTs | a, i |
| 358 | 14737 | AI008416 | | ESTs | g, General |
| 359 | 7308 | AA818407 | | ESTs | b, General |
| 360 | 6102 | AI228335 | | ESTs | General |
| 361 | 19728 | AI170394 | | ESTs | c |
| 362 | 6568 | AA817891 | | ESTs | General |
| 363 | 20891 | AI169337 | | ESTs, Highly similar to CGI-117 | General |
| | | | | protein [H. sapiens] | |
| 364 | 11375 | AI237594 | | ESTs, Weakly similar to G01614 | b, General |
| | | | | zinc finger protein 127 [H. sapiens] | |
| 365 | 1483 | U34843 | | Rattus norvegicus cell cycle | i |
| | | | | progression related D123 mRNA, | |
| | | | | complete cds | |
| 366 | 20684 | H32977 | | ESTs | General |
| 367 | 3959 | AA901338 | | ESTs, Highly similar to | g, General |
| | | | | IF2B_HUMAN EUKARYOTIC | |
| | | | | TRANSLATION INITIATION | |
| | | | | FACTOR 2 BETA SUBUNIT | |
| | | | | [H. sapiens] | |
| 368 | 19518 | AA800817 | | ESTs | a |
| 369 | 22445 | AA944530 | | ESTs, Highly similar to AF134238 1 | f |
| | | | | PL6 protein [M. musculus] | |
| 370 | 16312 | AA875032 | | ESTs | c, General |
| 371 | 19255 | M15562 | | Rat (diabetic BB) MHC class II | b, General |
| | | | | alpha chain RT1.D alpha (u) | |
| 372 | 4048 | AA851814 | | Rattus norvegicus osteoactivin | General |
| | | | | mRNA, complete cds | |
| 373 | 7471 | AI012379 | | ESTs | General |
| 374 | 21351 | AA945932 | Annexin III (Lipocortin III) | Annexin III (Lipocortin III) | d, General |
| 375 | 23963 | AA957139 | | ESTs | General |
| 376 | 9658 | AA943748 | | ESTs | d, General |
| 377 | 14384 | AI177096 | HMm: adenine phosphoribosyl | Rat adenine | c |
| | | | transferase | phosphoribosyltransferase (APRT) | |
| | | | | gene, complete cds | |
| 378 | 5531 | AI145859 | | ESTs | d |
| 379 | 3324 | AA997981 | | ESTs | e |
| 380 | 13083 | H31665 | | ESTs | d |
| 381 | 18400 | AA799991 | | ESTs | a, f, |
| | | | | | General |
| 382 | 15281 | D13623 | | ESTs | General |
| 383 | 22578 | AA924105 | | ESTs, Weakly similar to SY03 RAT | g |
| | | | | SMALL INDUCIBLE | |
| | | | | CYTOKINE A3 | |
| | | | | PRECURSOR [R. norvegicus] | |
| 384 | 12752 | AI012146 | | ESTs | General |
| 385 | 6606 | AI012308 | | ESTs | f, g, |
| | | | | | General |
| 386 | 11936 | AI228030 | | ESTs, Highly similar to SAP18 | h |
| | | | | [M. musculus] | |
| 387 | 2539 | AI111960 | | ESTs, Weakly similar to FKB5 | General |
| | | | | MOUSE 51 KDA FK506-BINDING | |
| | | | | PROTEIN [M. musculus] | |
| 388 | 6353 | AI008442 | PCTAIRE-1 protein kinase, | PCTAIRE-1 protein kinase, | f |
| | | | alternatively spliced | alternatively spliced | |
| 389 | 15786 | AI013924 | | ESTs | General |
| 390 | 16596 | AI102486 | | ESTs, Weakly similar to S37583 | General |
| | | | | RING finger protein rfp - mouse | |
| | | | | [M. musculus] | |
| 391 | 18581 | AI176160 | | ESTs | General |
| 392 | 4948 | AA924428 | | ESTs | h |
| 393 | 12098 | AI237075 | | ESTs | d |
| 394 | 20073 | AI639152 | | EST, Weakly similar to A1AT RAT | b, General |
| | | | | ALPHA-1-ANTIPROTEINASE | |
| | | | | PRECURSOR [R. norvegicus] | |
| 395 | 18456 | D00688 | | ESTs, Highly similar to 1903159A | General |
| | | | | monoamine oxidase A | |
| | | | | [R. norvegicus] | |
| 396 | 11208 | AI237586 | | ESTs, Moderately similar to INIB | General |
| | | | | RAT INTERFERON-INDUCIBLE | |
| | | | | PROTEIN [R. norvegicus] | |
| 397 | 8314 | AI059386 | | ESTs | General |
| 398 | 1893 | X51529 | phospholipase A2, group IIA | phospholipase A2, group IIA | General |
| | | | (platelets, synovial fluid) | (platelets, synovial fluid) | |
| 399 | 10821 | AI043999 | | ESTs | e |
| 400 | 20983 | AI044900 | Acyl CoA synthetase, long chain | Acyl CoA synthetase, long chain | General |
| 401 | 18472 | AI168975 | | ESTs | General |
| 402 | 21592 | AI102065 | | ESTs, Highly similar to AF117613 1 | General |
| | | | | heme-binding protein [M. musculus] | |
| 403 | 8665 | AI071965 | Heat shock protein 70-1 | ESTs, Moderately similar to T17342 | General |
| | | | | hypothetical protein | |
| | | | | DKFZp586K1924.1 | |
| | | | | [H. sapiens], Heat shock protein 70-1 | |
| 404 | 11066 | AI071602 | | ESTs | h |
| 405 | 19452 | AA964500 | | EST | e, f |
| 406 | 6509 | AI232361 | | ESTs | General |
| 407 | 22266 | AA945601 | | ESTs | a |
| 408 | 2742 | AI070173 | | ESTs | g, i, |
| | | | | | General |
| 409 | 244 | U38376 | | EST, Weakly similar to actin- | General |
| | | | | filament binding protein Frabin | |
| | | | | [R. norvegicus], Rattus norvegicus | |
| | | | | cytosolic phospholipase A2 mRNA, | |
| | | | | complete cds | |
| 410 | 4238 | AI234816 | | ESTs, Highly similar to | b |
| | | | | Y103_HUMAN HYPOTHETICAL | |
| | | | | PROTEIN KIAA0103 [H. sapiens] | |
| 411 | 9970 | AI045198 | | ESTs | General |
| 412 | 6550 | AA817947 | | ESTs | h |
| 413 | 5193 | AA925693 | | EST | General |
| 414 | 22175 | AA818999 | | ESTs, Highly similar to zinc finger | General |
| | | | | protein [H. sapiens] | |
| 415 | 16538 | AA799449 | | ESTs, Weakly similar to | h |
| | | | | nucleosome assembly protein | |
| | | | | [R. norvegicus] | |
| 416 | 1830 | AI009002 | | Rat mRNA for cdc25B, complete | a, b |
| | | | | cds | |
| 417 | 17485 | AI012352 | | ESTs | General |
| 418 | 3982 | AI175100 | | ESTs | General |
| 419 | 3965 | AI112118 | | ESTs | General |
| 420 | 5969 | AI102520 | | ESTs, Moderately similar to | c, General |
| | | | | AF161588 1 GABA-A receptor- | |
| | | | | associated protein [R. norvegicus] | |
| 421 | 15088 | AI232613 | | ESTs, Highly similar to AF151886 1 | General |
| | | | | CGI-128 protein [H. sapiens] | |
| 422 | 25691 | X53504 | | | e |
| 423 | 2984 | AA997015 | | ESTs | General |
| 424 | 11708 | AI171807 | | ESTs | General |
| 425 | 23187 | AI144591 | | ESTs | General |
| 426 | 16818 | AI072906 | | ESTs | a |
| 427 | 19298 | AI236338 | | ESTs, Weakly similar to NHPX RAT | General |
| | | | | NHP2/RS6 FAMILY PROTEIN | |
| | | | | YEL026W HOMOLOG | |
| | | | | [R. norvegicus] | |
| 428 | 14345 | AA944773 | | ESTs | e |
| 429 | 10109 | X58465 | Ribosomal protein S5 | Ribosomal protein S5 | e |
| 430 | 5596 | AI044747 | | ESTs | e, General |
| 431 | 14989 | AI177366 | Integrin, beta 1 | Integrin, beta 1 | f, i, General |
| 432 | 17320 | AI178069 | | ESTs | General |
| 433 | 13646 | X62166 | | ESTs, Highly similar to RL3 RAT | General |
| | | | | 60S RIBOSOMAL PROTEIN L3 | |
| | | | | [R. norvegicus] | |
| 434 | 18611 | X58200 | ribosomal protein L23 | ESTs, Highly similar to | e, General |
| | | | | RL23_HUMAN 60S RIBOSOMAL | |
| | | | | PROTEIN L23 [R. norvegicus] | |
| 435 | 21671 | AA900295 | | Rattus norvegicus placenta growth | General |
| | | | | factor (PIGF) mRNA, complete cds | |
| 436 | 9452 | AA955206 | | ESTs | General |
| 437 | 20901 | AA942706 | | ESTs | d |
| 438 | 21985 | AA943273 | | ESTs | a |
| 439 | 7168 | AI012739 | | ESTs | General |
| 440 | 12195 | AA899121 | | ESTs, Weakly similar to RanBPM | General |
| | | | | [H. sapiens] | |
| 441 | 15929 | AA849740 | | ESTs, Highly similar to CGI-126 | General |
| | | | | protein [H. sapiens] | |
| 442 | 16322 | AA866240 | | EST | c |
| 443 | 18047 | AI171359 | | ESTs | c |
| 444 | 15966 | AA923994 | | ESTs, Highly similar to | b |
| | | | | DRG2_HUMAN | |
| | | | | DEVELOPMENTALLY | |
| | | | | REGULATED GTP-BINDING | |
| | | | | PROTEIN 2 [H. sapiens] | |
| 445 | 13251 | AI179264 | | ESTs, Moderately similar to LZIP-1 | General |
| | | | | and LZIP-2 [M. musculus] | |
| 446 | 18095 | AI177482 | SH-PTP2 protein tyrosine | SH-PTP2 protein tyrosine | i, General |
| | | | phosphatase, non-receptor type | phosphatase, non-receptor type 11 | |
| | | | 11 | | |
| 447 | 16053 | AI228596 | | ESTs, Weakly similar to T16757 | General |
| | | | | hypothetical protein R144.3 - | |
| | | | | Caenorhabditis elegans [C. elegans] | |
| 448 | 10684 | AA849687 | | ESTs, Weakly similar to | e, f |
| | | | | ALZHEIMER'S DISEASE | |
| | | | | AMYLOID A4 PROTEIN | |
| | | | | HOMOLOG PRECURSOR | |
| | | | | [R. norvegicus] | |
| 449 | 22691 | AI177967 | | ESTs, Weakly similar to TGFB RAT | General |
| | | | | LATENT TRANSFORMING | |
| | | | | GROWTH FACTOR BETA | |
| | | | | BINDING PROTEIN 1 | |
| | | | | PRECURSOR [R. norvegicus] | |
| 450 | 15438 | AI179399 | collagen type V, alpha 2 | collagen type V, alpha 2 | e |
| 451 | 20975 | AA799599 | | ESTs | f, General |
| 452 | 15048 | M24542 | HHs: ubiquinol-cytochrome c | Rat Rieske iron-sulfur protein | c, i |
| | | | reductase, Rieske iron-sulfur | mRNA, complete cds | |
| | | | polypeptide 1 | | |
| 453 | 19379 | AI102711 | | ESTs, Moderately similar to RL3 | General |
| | | | | RAT 60S RIBOSOMAL PROTEIN | |
| | | | | L3 [R. norvegicus] | |
| 454 | 12583 | AI234251 | | ESTs | General |
| 455 | 19480 | AA944442 | | ESTs, Weakly similar to DRAL | c |
| | | | | [R. norvegicus] | |
| 456 | 7700 | AI105383 | | ESTs, Weakly similar to T19707 | General |
| | | | | hypothetical protein C34C6.5 - | |
| | | | | Caenorhabditis elegans [C. elegans] | |
| 457 | 21996 | AA946036 | | ESTs | f |
| 458 | 26148 | AI013396 | | | General |
| 459 | 9551 | AI013558 | | ESTs | d |
| 460 | 23632 | AI237273 | | ESTs | d, f, |
| | | | | | General |
| 461 | 15292 | AF012714 | multiple inositol polyphosphate | multiple inositol polyphosphate | c |
| | | | histidine phosphatase 1 | histidine phosphatase 1 | |
| 462 | 6632 | AI235277 | | ESTs | General |
| 463 | 18406 | AI236168 | | ESTs | General |
| 464 | 11865 | AA866383 | | ESTs | General |
| 465 | 20461 | AI639350 | | ESTs | I, General |
| 466 | 11728 | AI007884 | | ESTs | d |
| 467 | 6562 | AI177734 | | ESTs | d, General |
| 468 | 3046 | AA997706 | | ESTs | h |
| 469 | 25730 | X63369 | | | General |
| 470 | 23166 | AA859954 | | ESTs | General |
| 471 | 3271 | AI010303 | | ESTs | e |
| 472 | 4626 | AI104744 | | ESTs | General |
| 473 | 6430 | AI232319 | | ESTs, Highly similar to JC5221 | General |
| | | | | stomatin - mouse [M. musculus] | |
| 474 | 6262 | AI177125 | | ESTs | General |
| 475 | 8786 | AA996993 | | EST, Moderately similar to Prer | d |
| | | | | protein [H. sapiens], ESTs, Highly | |
| | | | | similar to rer [M. musculus] | |
| 476 | 12946 | AI228291 | | ESTs | General |
| 477 | 23015 | AI227724 | | ESTs | f, General |
| 478 | 15949 | AA963780 | | ESTs | i |
| 479 | 5458 | AI009756 | ALG-2 interacting protein 1 | ALG-2 interacting protein 1 | g, i, |
| | | | | | General |
| 480 | 11726 | AA849518 | | ESTs | d |
| 481 | 22197 | AI178527 | | ESTs | General |
| 482 | 21311 | AI178688 | | ESTs | General |
| 483 | 16092 | AI009012 | | ESTs, Highly similar to Wdr1 | g, i, |
| | | | | protein [M. musculus] | General |
| 484 | 15283 | AA858548 | | ESTs | i, General |
| 485 | 23601 | AA955126 | | EST, Moderately similar to MYBB | f |
| | | | | MOUSE MYB-RELATED | |
| | | | | PROTEIN | |
| | | | | B [M. musculus] | |
| 486 | 2418 | AI013790 | | ESTs, Moderately similar to T08802 | e |
| | | | | hypothetical protein | |
| | | | | DKFZp586D0623.1 [H. sapiens] | |
| 487 | 3214 | AI235483 | | ESTs | General |
| 488 | 20056 | AI639504 | | ESTs, Weakly similar to T13607 | General |
| | | | | hypothetical protein EG: 87B1.3 - | |
| | | | | fruit fly [D.melanogaster] | |
| 489 | 6431 | AA859085 | | ESTs | General |
| 490 | 17145 | M38566 | Serine protease inhibitor | Serine protease inhibitor | i |
| 491 | 15492 | AA892376 | | ESTs | h |
| 492 | 23687 | AI137958 | | ESTs | e |
| 493 | 17224 | AI179883 | | ESTs, Moderately similar to | c |
| | | | | Sid393p [M. musculus] | |
| 494 | 3682 | AA998964 | | ESTs | c |
| 495 | 21818 | AF036537 | | Rattus norvegicus homocysteine | c |
| | | | | respondent protein HCYP2 mRNA, | |
| | | | | complete cds | |
| 496 | 3434 | AI232014 | | ESTs | General |
| 497 | 15084 | AA799397 | | ESTs | a |
| 498 | 23013 | AI230743 | actin-related protein 3 | actin-related protein 3 | General |
| 429 | 25702 | X58465 | | | e |
| 499 | 3817 | AA926328 | Tyrosine 3- | Tyrosine 3- | General |
| | | | monooxygenase/tryptophan 5- | monooxygenase/tryptophan 5- | |
| | | | monooxygenase activation | monooxygenase activation protein, | |
| | | | protein, zeta polypeptide | zeta polypeptide | |
| 500 | 3669 | AA957535 | | ESTs | g, i, |
| | | | | | General |
| 501 | 11331 | AI145556 | | ESTs | d |
| 502 | 15558 | AA875537 | | ESTs, Weakly similar to A46241 | General |
| | | | | interferon response element-binding | |
| | | | | factor IREBF-2 - mouse | |
| | | | | [M. musculus] | |
| 503 | 23409 | AA956294 | | ESTs | General |
| 504 | 4652 | AA899642 | | ESTs | General |
| 505 | 14117 | AI171350 | | ESTs | General |
| 506 | 18744 | AI170407 | | ESTs | General |
| 507 | 11561 | AI233182 | | ESTs | General |
| 508 | 22711 | AA946072 | | ESTs | General |
| 509 | 3941 | AI011598 | | ESTs, Moderately similar to LMA5 | d, i, |
| | | | | MOUSE LAMININ | General |
| | | | | ALPHA-5 CHAIN | |
| | | | | [M. musculus] | |
| 510 | 23464 | AA925876 | | ESTs | General |
| 511 | 168 | AA924985 | calsequestrin 2 | calsequestrin 2 | h |
| 512 | 14944 | AA925364 | | ESTs | e |
| 513 | 24228 | AA800318 | | ESTs, Weakly similar to A1AT RAT | b |
| | | | | ALPHA-1-ANTIPROTEINASE | |
| | | | | PRECURSOR [R. norvegicus] | |
| 514 | 23822 | AA943114 | | ESTs | General |
| 515 | 12988 | AI137070 | | ESTs | b, General |
| 516 | 4499 | AA892511 | | EST, Weakly similar to CA22 RAT | e |
| | | | | CALCIUM-BINDING | |
| | | | | PROTEIN P22 | |
| | | | | [R. norvegicus] | |
| 517 | 12274 | AA964306 | | ESTs | General |
| 518 | 6094 | AA818911 | | ESTs | d |
| 519 | 19257 | AI030775 | | Rat (diabetic BB) MHC class II | b |
| | | | | alpha chain RT1.D alpha (u) | |
| 520 | 17847 | AI178214 | | ESTs | General |
| 521 | 18887 | AA892860 | | ESTs | General |
| 522 | 20740 | S69874 | | Rattus norvegicus Sprague-Dawley | c, d, |
| | | | | lipid-binding protein mRNA, | General |
| | | | | complete cds | |
| 523 | 4770 | AI235915 | | ESTs | f |
| 524 | 21705 | AA900684 | | ESTs, Moderately similar to | f |
| | | | | Y064_HUMAN HYPOTHETICAL | |
| | | | | PROTEIN KIAA0064 [H. sapiens] | |
| 525 | 18797 | AI236618 | | ESTs, Weakly similar to KIAA0597 | General |
| | | | | protein [H. sapiens] | |
| 526 | 22212 | AI236294 | | ESTs, Highly similar to translation | General |
| | | | | initiation factor eIF6 [M. musculus] | |
| 527 | 2153 | U75404 | | ESTs | General |
| 528 | 21654 | U53184 | estrogen-responsive uterine | estrogen-responsive uterine | i, General |
| | | | transcript | transcript | |
| 529 | 3191 | AI013075 | | ESTs, Weakly similar to T03454 | General |
| | | | | ALR protein [H. sapiens] | |
| 530 | 16613 | AA874784 | | ESTs | e, f, |
| | | | | | General |
| 531 | 5482 | AI180252 | | ESTs | General |
| 532 | 14337 | AI180414 | | ESTs, Moderately similar to SPA1 | General |
| | | | | MOUSE GTPASE-ACTIVATING | |
| | | | | PROTEIN SPA-1 [M. musculus] | |
| 533 | 23471 | AA955162 | | ESTs | General |
| 534 | 4098 | AI008642 | | ESTs, Weakly similar to LANP RAT | i, General |
| | | | | LEUCINE-RICH | |
| | | | | ACIDIC NUCLEAR | |
| | | | | PROTEIN [R. norvegicus] | |
| 535 | 23372 | AI031002 | | ESTs | h |
| 536 | 18217 | AA858930 | | ESTs | General |
| 537 | 3905 | AI103403 | polypyrimidine tract binding | polypyrimidine tract binding protein | General |
| | | | protein | | |
| 538 | 24375 | AI104979 | | ESTs, Moderately similar to | General |
| | | | | nucleolar protein p40 [H. sapiens] | |
| 539 | 14256 | AI176845 | | ESTs, Weakly similar to cornichon | General |
| | | | | [M. musculus] | |
| 540 | 18349 | AA799744 | | ESTs | General |
| 541 | 2310 | AI029969 | | ESTs | General |
| 542 | 3437 | AA892897 | | ESTs | General |
| 543 | 806 | AI169231 | | ESTs, Highly similar to GENE 33 | General |
| | | | | POLYPEPTIDE [R. norvegicus] | |
| 544 | 11531 | AA799773 | | ESTs, Highly similar to gamma- | g, h, i, |
| | | | | filamin [H. sapiens] | General |
| 545 | 15181 | AI235234 | | ESTs | i |
| 546 | 22689 | AA945962 | | ESTs | General |
| 547 | 9084 | AA893717 | | ESTs | f |
| 548 | 5307 | AA893529 | | ESTs, Weakly similar to | b |
| | | | | selenocysteine tRNA gene | |
| | | | | transcription activating factor | |
| | | | | [M. musculus] | |
| 549 | 25663 | X05472 | | | e |
| 550 | 18278 | AI105080 | | ESTs, Moderately similar to | General |
| | | | | SCOT_HUMAN | |
| | | | | SUCCINYL-COA: 3- | |
| | | | | KETOACID-COENZYME A | |
| | | | | TRANSFERASE PRECURSOR | |
| | | | | [H. sapiens] | |
| 551 | 6044 | AI011285 | | ESTs | a, General |
| 552 | 17361 | AA859114 | | ESTs | i, General |
| 553 | 22464 | AI009713 | | ESTs | d |
| 554 | 8137 | AA800749 | | ESTs | e |
| 555 | 16426 | X70369 | procollagen, type III, alpha 1 | procollagen, type III, alpha 1 | c, e |
| 556 | 24237 | AA817726 | | ESTs | General |
| 557 | 17950 | AI236590 | | ESTs | General |
| 558 | 18172 | AI058364 | | ESTs, Weakly similar to G02313 | d, g, |
| | | | | CDC37 homolog [H. sapiens] | General |
| 559 | 22614 | AI031004 | | ESTs, Highly similar to SX17 | d |
| | | | | MOUSE TRANSCRIPTION | |
| | | | | FACTOR SOX-17 [M. musculus] | |
| 560 | 23005 | AA942770 | | ESTs | General |
| 561 | 17285 | J02827 | Branched chain alpha-ketoacid | Branched chain alpha-ketoacid | General |
| | | | dehydrogenase subunit E1 alpha | dehydrogenase subunit E1 alpha | |
| 562 | 15885 | AA965207 | | ESTs, Highly similar to KIAA0958 | d |
| | | | | protein [H. sapiens] | |
| 563 | 5461 | AI044338 | | ESTs | General |
| 564 | 22677 | AA942718 | | ESTs | General |
| 565 | 18507 | AI175551 | | ESTs, Moderately similar to | General |
| | | | | AF145050 1 translation elongation | |
| | | | | factor 1-delta subunit | |
| | | | | [R. norvegicus] | |
| 566 | 8012 | AI058330 | decay-accelarating factor | decay-accelarating factor | General |
| 567 | 13310 | AI177119 | | ESTs, Weakly similar to C1QB RAT | b, General |
| | | | | COMPLEMENT C1Q | |
| | | | | SUBCOMPONENT, B CHAIN | |
| | | | | PRECURSOR [R. norvegicus] | |
| 568 | 6548 | AI072658 | | ESTs | d, General |
| 569 | 7941 | AI043958 | | ESTs | g, i, |
| | | | | | General |
| 570 | 13619 | AI179464 | | ESTs | General |
| 571 | 3207 | AA997466 | | ESTs | General |
| 572 | 20582 | AA859688 | | ESTs, Weakly similar to I37195 AU- | f, General |
| | | | | specific RNA-binding protein/enoyl- | |
| | | | | CoA hydratase homolog [H. sapiens] | |
| 573 | 21796 | AI012221 | | ESTs, Weakly similar to S70484 | g, General |
| | | | | RS43 protein - rat (fragment) | |
| | | | | [R. norvegicus] | |
| 574 | 19071 | AA850524 | | ESTs, Highly similar to I49257 | f |
| | | | | NF2d9 - mouse [M. musculus] | |
| 575 | 24200 | AI012356 | | ESTs | General |
| 576 | 24246 | AA963703 | | ESTs, Highly similar to cell cycle | g, General |
| | | | | protein p38-2G4 homolog | |
| | | | | [H. sapiens] | |
| 577 | 6133 | AA866234 | | ESTs, Highly similar to | c |
| | | | | EFTU_HUMAN ELONGATION | |
| | | | | FACTOR TU, MITOCHONDRIAL | |
| | | | | PRECURSOR [H. sapiens] | |
| 578 | 21632 | AI009167 | | ESTs, Highly similar to BAG-family | General |
| | | | | molecular chaperone regulator-2 | |
| | | | | [H. sapiens] | |
| 579 | 13772 | AA851926 | | ESTs, Weakly similar to A57514 | General |
| | | | | RNA helicase HEL117 - rat | |
| | | | | [R. norvegicus] | |
| 580 | 22247 | AA943537 | | Rattus norvegicus zyxin mRNA, | i, General |
| | | | | partial cds | |
| 581 | 23732 | AA957653 | | ESTs, Weakly similar to RNB6 | General |
| | | | | [R. norvegicus] | |
| 582 | 22385 | AA859805 | | ESTs, Moderately similar to LYOX | e |
| | | | | RAT PROTEIN-LYSINE 6- | |
| | | | | OXIDASE PRECURSOR | |
| | | | | [R. norvegicus] | |
| 583 | 2459 | AA964755 | | ESTs | i |
| 584 | 23964 | AI234748 | | ESTs | g, General |
| 585 | 4074 | AI175990 | | ESTs | g |
| 586 | 17204 | AI171844 | HMm: RIKEN cDNA 2410043G19 | Rattus norvegicus F1-ATPase | e, g |
| | | | gene | epsilon subunit mRNA, nuclear | |
| | | | | gene encoding mitochondrial | |
| | | | | protein, complete cds | |
| 587 | 6560 | AI230440 | | ESTs | d |
| 588 | 17883 | M11851 | | Rat heart myosin light chain 2 | a, b |
| | | | | (MLC2) mRNA, 3′ end | |
| 589 | 22937 | AA850290 | | ESTs | i |
| 590 | 4944 | AA924405 | | ESTs, Moderately similar to | g, General |
| | | | | NO56_HUMAN NUCLEOLAR | |
| | | | | PROTEIN NOP56 [H. sapiens] | |
| 591 | 3822 | AA900863 | | ESTs, Weakly similar to nuclear | g, General |
| | | | | RNA helicase [R. norvegicus] | |
| 592 | 2729 | AI170363 | | ESTs | d |
| 593 | 19282 | AA955123 | | EST | General |
| 594 | 21740 | AI176810 | | ESTs | General |
| 595 | 23773 | AA956476 | | ESTs | General |
| 596 | 6843 | AI009768 | | ESTs | f |
| 597 | 14840 | AI237698 | | ESTs | General |
| 598 | 20038 | AA899797 | | EST | c, General |
| 599 | 18541 | X14671 | | ESTs, Highly similar to RL26 RAT | e, h |
| | | | | 60S RIBOSOMAL PROTEIN L26 | |
| | | | | [R. norvegicus] | |
| 600 | 13966 | AI231421 | | ESTs | d, General |
| 601 | 17234 | AI102741 | Tissue inhibitor of | Tissue inhibitor of | h |
| | | | metalloproteinase 3 | metalloproteinase 3 | |
| 602 | 22544 | AA851245 | | ESTs, Weakly similar to KIAA0926 | General |
| | | | | protein [H. sapiens] | |
| 603 | 13023 | AI233740 | | ESTs, Weakly similar to ALDR RAT | General |
| | | | | ALDOSE REDUCTASE | |
| | | | | [R. norvegicus] | |
| 604 | 24209 | AI172423 | | ESTs | i, General |
| 605 | 23626 | AA955540 | | ESTs | General |
| 606 | 4670 | AI233714 | | ESTs | h |
| 607 | 18215 | AA943367 | | ESTs | h |
| 608 | 3014 | AI176362 | | ESTs | c, General |
| 609 | 16756 | AA818089 | | ESTs, Highly similar to glycyl-tRNA | General |
| | | | | synthetase [H. sapiens] | |
| 610 | 22605 | AA859447 | | ESTs | i |
| 611 | 5283 | AF090113 | | Rattus norvegicus glutamate | h |
| | | | | receptor interacting protein 2 | |
| | | | | (GRIP2) mRNA, complete cds | |
| 612 | 6043 | AI059588 | | ESTs, Weakly similar to 54TMp | g |
| | | | | [H. sapiens] | |
| 613 | 21474 | AA851361 | | ESTs | d |
| 614 | 23038 | AA900881 | branched chain | branched chain aminotransferase 1, | General |
| | | | aminotransferase 1, cytosolic | cytosolic | |
| 615 | 13336 | AI237070 | | ESTs, Weakly similar to | a, b, |
| | | | | dJ1042K10.4 [H. sapiens] | General |
| 616 | 3988 | AI008546 | proteasome (prosome, | proteasome (prosome, macropain) | d |
| | | | macropain) subunit, alpha type 3 | subunit, alpha type 3 | |
| 617 | 20823 | AI176302 | | ESTs, Highly similar to A47416 | d |
| | | | | ubiquitin-like protein/ribosomal | |
| | | | | protein S30 - rat [R. norvegicus] | |
| 618 | 23044 | AF034218 | hyaluronidase 2 | hyaluronidase 2 | General |
| 619 | 19013 | AI639256 | | ESTs | a |
| 620 | 16124 | AI176963 | | Rattus norvegicus transcription | c |
| | | | | factor MRG1 mRNA, complete cds | |
| 621 | 17848 | AA900460 | | ESTs, Weakly similar to TCPA RAT | General |
| | | | | T-COMPLEX PROTEIN 1, ALPHA | |
| | | | | SUBUNIT [R. norvegicus] | |
| 622 | 19074 | AI009391 | | ESTs | f |
| 623 | 3615 | AI237645 | transferrin receptor | transferrin receptor | d, General |
| 624 | 11387 | AA891677 | | ESTs | General |
| 625 | 25765 | X89706 | | | General |
| 626 | 21653 | AI237535 | estrogen-responsive uterine | estrogen-responsive uterine | General |
| | | | transcript | transcript | |
| 627 | 5228 | AI233311 | | ESTs, Highly similar to cytokine-like | General |
| | | | | factor-1 precursor [H. sapiens] | |
| 628 | 7299 | AI013911 | | ESTs, Weakly similar to CIRP | c, d, |
| | | | | [R. norvegicus] | General |
| 629 | 2093 | AI102097 | | ESTs | General |
| 630 | 9166 | AI137406 | | ESTs | i, General |
| 631 | 19723 | AA818761 | | ESTs | General |
| 632 | 2741 | AA963077 | | EST | General |
| 633 | 22667 | AA945069 | | ESTs | General |
| 634 | 17687 | AA799531 | | ESTs, Weakly similar to T23793 | a, e |
| | | | | hypothetical protein M18.3 - | |
| | | | | Caenorhabditis elegans [C. elegans] | |
| 635 | 23217 | AI235953 | | ESTs | General |
| 636 | 12135 | AI176418 | | ESTs | c |
| 637 | 19894 | AA859581 | | Rattus norvegicus late gestation | d |
| | | | | lung protein 1 (Lgl1) mRNA, | |
| | | | | complete cds | |
| 638 | 15345 | AI171587 | | ESTs | h |
| 639 | 23165 | AI231799 | | ESTs, Moderately similar to I68673 | General |
| | | | | gene X123 protein [H. sapiens] | |
| 640 | 3391 | AA998197 | | EST | General |
| 641 | 16215 | AA874999 | | ESTs, Moderately similar to | General |
| | | | | AF133910 1 ARL-6 interacting | |
| | | | | protein-3 [M. musculus] | |
| 642 | 19086 | AA892598 | | ESTs | General |
| 643 | 4725 | AA900290 | | ESTs, Highly similar to ALPHA-2- | d, General |
| | | | | MACROGLOBULIN PRECURSOR | |
| | | | | [R. norvegicus] | |
| 644 | 6727 | AI233213 | | ESTs | a, g |
| 645 | 21816 | AI231217 | | ESTs, Highly similar to S61A RAT | h, General |
| | | | | PROTEIN TRANSPORT PROTEIN | |
| | | | | SEC61 ALPHA SUBUNIT | |
| | | | | [R. norvegicus] | |
| 646 | 2069 | AI103616 | | ESTs, Weakly similar to RhoA | g, i, |
| | | | | [R. norvegicus] | General |
| 647 | 22717 | AI235948 | | ESTs, Highly similar to entactin | e, g |
| | | | | [R. norvegicus] | |
| 648 | 11205 | AI172057 | | ESTs | General |
| 649 | 22498 | AA944806 | | ESTs | c |
| 650 | 7192 | AI178530 | | ESTs | c |
| 651 | 8058 | AA818475 | | ESTs | General |
| 652 | 18800 | AI178504 | | ESTs | General |
| 653 | 12376 | AI103939 | | ESTs | i |
| 654 | 12695 | AI170948 | | ESTs, Moderately similar to S68207 | i, General |
| | | | | G protein-coupled receptor 6C.1 | |
| | | | | [H. sapiens] | |
| 655 | 5227 | AA925924 | | ESTs, Highly similar to cytokine-like | f, i, General |
| | | | | factor-1 precursor [H. sapiens] | |
| 656 | 7936 | AA875495 | | ESTs | i, General |
| 657 | 4491 | AA818798 | | Rattus norvegicus mRNA for | General |
| | | | | cathepsin Y, partial cds | |
| 658 | 13647 | AA892367 | | ESTs, Highly similar to RL3 RAT | General |
| | | | | 60S RIBOSOMAL PROTEIN L3 | |
| | | | | [R. norvegicus] | |
| 659 | 25716 | X61295 | | | e |
| 660 | 10547 | AA800186 | | EST | General |
| 661 | 7760 | AI030806 | | ESTs | b, General |
| 662 | 16687 | AI013553 | | ESTs | a |
| 663 | 24040 | AA957422 | | ESTs, Highly similar to HIGH | General |
| | | | | AFFINITY IMMUNOGLOBULIN | |
| | | | | EPSILON RECEPTOR GAMMA- | |
| | | | | SUBUNIT PRECURSOR | |
| | | | | [R. norvegicus] | |
| 664 | 16154 | AI009661 | | ESTs, Moderately similar to AF1q | i |
| | | | | [M. musculus] | |
| 665 | 14390 | AI232385 | | ESTs | g |
| 666 | 14651 | AI235919 | | ESTs | General |
| 667 | 17289 | AA891785 | HMm: isocitrate dehydrogenase 2 | ESTs, Weakly similar to IDHC RAT | b |
| | | | (NADP+), mitochondrial | ISOCITRATE DEHYDROGENASE | |
| | | | | [R. norvegicus] | |
| 668 | 12609 | AA997486 | | ESTs | d, i, |
| | | | | | General |
| 669 | 21657 | X61381 | | Rattus norvegicus interferon- | b, i, |
| | | | | inducible protein variant 10 mRNA, | General |
| | | | | complete cds | |
| 670 | 5384 | AA891041 | jun B proto-oncogene | jun B proto-oncogene | General |
| 671 | 5613 | AI044850 | | ESTs | b |
| 672 | 16136 | AI103983 | unknown Glu-Pro dipeptide | Rattus norvegicus clone BB.1.4.1 | General |
| | | | repeat protein | unknown Glu-Pro dipeptide repeat | |
| | | | | protein mRNA, complete cds | |
| 673 | 23270 | AI179601 | | ESTs | General |
| 674 | 14464 | AI104848 | | ESTs | General |
| 675 | 6053 | AA818655 | | EST | d |
| 676 | 19067 | AA859663 | | ESTs | General |
| 677 | 22877 | AI178819 | | ESTs, Moderately similar to CGI- | General |
| | | | | 137 protein [H. sapiens] | |
| 678 | 14257 | AI230460 | | ESTs | e |
| 679 | 5132 | AA925342 | | ESTs, Highly similar to SKLM | General |
| | | | | MOUSE SKELEMIN [M. musculus] | |
| 680 | 2706 | AA965083 | | ESTs | General |
| 681 | 22615 | AA945643 | | ESTs | f, General |
| 682 | 13460 | AI175375 | | ESTs | General |
| 683 | 8707 | AI059707 | | ESTs | i, General |
| 684 | 17948 | AA944581 | | ESTs, Highly similar to RAB/Rip | General |
| | | | | protein [M. musculus] | |
| 685 | 13082 | AI136848 | | ESTs, Weakly similar to T34013 | a, b |
| | | | | hypothetical protein Y4C6B.5 - | |
| | | | | Caenorhabditis elegans [C. elegans] | |
| 686 | 16074 | AA874874 | | ESTs, Highly similar to ADHX RAT | f |
| | | | | ALCOHOL DEHYDROGENASE | |
| | | | | CLASS III [R. norvegicus] | |
| 687 | 8861 | AI070306 | | ESTs | General |
| 688 | 8594 | AI012932 | | ESTs | General |
| 689 | 22311 | AI176007 | | ESTs, Highly similar to | General |
| | | | | PM5P_HUMAN PROTEIN PM5 | |
| | | | | PRECURSOR [H. sapiens] | |
| 690 | 24268 | AI172281 | | ESTs | e |
| 691 | 9073 | AA892273 | | ESTs | a, b |
| 692 | 22423 | AA893164 | | ESTs | b |
| 693 | 5550 | AI044628 | | ESTs, Weakly similar to unknown | General |
| | | | | [H. sapiens] | |
| 694 | 3895 | AA894029 | | ESTs | b |
| 695 | 19069 | AA943737 | endothelial differentiation | endothelial differentiation | General |
| | | | sphingolipid G-protein-coupled | sphingolipid G-protein-coupled | |
| | | | recep | receptor 1 | |
| 696 | 22666 | AA900974 | | ESTs | d, General |
| 697 | 2852 | AI177059 | | ESTs | e, General |
| 698 | 12108 | AA848963 | | ESTs, Moderately similar to DNA- | a |
| | | | | REPAIR PROTEIN | |
| | | | | COMPLEMENTING XP-C CELLS | |
| | | | | HOMOLOG [M. musculus] | |
| 699 | 23240 | AA893939 | | ESTs, Highly similar to Method: | i |
| | | | | conceptual translation supplied by | |
| | | | | author [M. musculus] | |
| 700 | 4161 | AI112141 | | ESTs, Weakly similar to A55169 | General |
| | | | | pre-T-cell receptor alpha chain | |
| | | | | precursor - mouse [M. musculus] | |
| 701 | 18272 | AA799294 | | ESTs, Highly similar to KIAA0740 | c, e, |
| | | | | protein [H. sapiens] | General |
| 702 | 23612 | AI170751 | | ESTs | General |
| 703 | 4790 | AA900875 | | Rattus norvegicus transcription | General |
| | | | | factor MRG2 mRNA, complete cds | |
| 704 | 16168 | AA893280 | | ESTs, Moderately similar to | General |
| | | | | adipophilin [H. sapiens] | |
| 705 | 11644 | AI235282 | | ESTs, Moderately similar to AM2 | General |
| | | | | receptor [M. musculus] | |
| 706 | 19057 | AI235094 | cortactin isoform B | cortactin isoform B | General |
| 707 | 9501 | AI638949 | | ESTs, Weakly similar to S44893 | a |
| | | | | ZK1236.7 protein - Caenorhabditis | |
| | | | | elegans [C. elegans] | |
| 708 | 24310 | AA924578 | | ESTs | e, General |
| 709 | 1283 | U61729 | | Rattus norvegicus proline rich. | General |
| | | | | protein mRNA, complete cds | |
| 710 | 7681 | AI030449 | | ESTs, Moderately similar to | General |
| | | | | methyltransferase related protein | |
| | | | | [M. musculus] | |
| 711 | 1439 | U57391 | | Rattus norvegicus FceRI gamma- | General |
| | | | | chain interacting protein SH2-B | |
| | | | | (SH2-B) mRNA, complete cds | |
| 712 | 20872 | X51707 | ribosomal protein S19 | ESTs, Highly similar to RS19 RAT | f |
| | | | | 40S RIBOSOMAL PROTEIN S19 | |
| | | | | [R. norvegicus] | |
| 713 | 21660 | AI169751 | | Rattus norvegicus interferon- | b, General |
| | | | | inducible protein variant 10 mRNA, | |
| | | | | complete cds | |
| 714 | 19454 | AA998888 | | ESTs, Weakly similar to T09013 | f |
| | | | | RING finger protein Fxy - mouse | |
| | | | | [M. musculus] | |
| 715 | 12979 | AI169177 | | ESTs, Highly similar | General |
| | | | | to RADIATION- | |
| | | | | INDUCIBLE IMMEDIATE-EARLY | |
| | | | | GENE IEX-1 [M. musculus] | |
| 716 | 5675 | AI045026 | | ESTs | General |
| 717 | 17903 | AI231083 | | ESTs, Moderately similar to | d, General |
| | | | | AF155103 1 NY-REN-25 antigen | |
| | | | | [H. sapiens] | |
| 718 | 6743 | AI231219 | | ESTs | d, General |
| 719 | 23538 | AI102727 | solute carrier family 20 | solute carrier family 20 (phosphate | General |
| | | | (phosphate transporter), member 1 | transporter), member 1 | |
| 720 | 20617 | X53581 | | | e |
| 721 | 19416 | AA850244 | | ESTs | General |
| 722 | 16191 | AA874982 | | ESTs | c |
| 723 | 8745 | AI069939 | | ESTs | d |
| 724 | 14494 | AI234222 | | ESTs | g |
| 725 | 22681 | AA944413 | | ESTs | General |
| 726 | 21579 | AI103572 | | ESTs | General |
| 727 | 23978 | AA925352 | | ESTs | h, General |
| 728 | 25742 | X80130 | | | a, b, c |
| 729 | 14458 | AI145095 | | ESTs | General |
| 730 | 6172 | AA819646 | | ESTs, Highly similar to AF055084 1 | General |
| | | | | very large G-protein coupled | |
| | | | | receptor-1 [H. sapiens] | |
| 731 | 1998 | AA817864 | | ESTs | b |
| 732 | 25545 | S77900 | | | c |
| 733 | 12999 | AI176276 | | ESTs, Highly similar to | d |
| | | | | UAP1_HUMAN UDP-N- | |
| | | | | ACETYLHEXOSAMINE | |
| | | | | PYROPHOSPHORYLASE | |
| | | | | [H. sapiens] | |
| 734 | 1159 | AA891949 | | ESTs | g, General |
| 735 | 18907 | AI178971 | | Rattus norvegicus alpha-globin | a, b, |
| | | | | (GloA) gene, complete cds | General |
| 736 | 25647 | U83119 | | | e |
| 737 | 17892 | AI228438 | | ESTs | a |
| 738 | 18447 | AA849939 | | ESTs | b, General |
| 401 | 18473 | AI168975 | | ESTs | General |
| 739 | 4222 | AA860024 | | ESTs, Highly similar to | General |
| | | | | EF1G_HUMAN ELONGATION | |
| | | | | FACTOR 1-GAMMA [H. sapiens] | |
| 740 | 15197 | AI105444 | | ESTs | General |
| 741 | 22958 | AI171374 | | ESTs, Moderately similar to | d, General |
| | | | | meningioma-expressed antigen 11 | |
| | | | | [H. sapiens] | |
| 742 | 9111 | AI073176 | | ESTs, Weakly similar to G01614 | General |
| | | | | zinc finger protein 127 [H. sapiens] | |
| 743 | 23110 | AI169640 | | ESTs, Weakly similar to | d |
| | | | | AR20_CAEEL PROBABLE ARP2/3 | |
| | | | | COMPLEX 20 KDA | |
| | | | | SUBUNIT (P20- | |
| | | | | ARC) [C. elegans] | |
| 744 | 20998 | AA799803 | | ESTs, Weakly similar to serine | General |
| | | | | protease [R. norvegicus] | |
| 745 | 23184 | AI176554 | | ESTs | d |
| 746 | 14149 | AA998172 | platelet-activating factor | platelet-activating factor | i |
| | | | acetylhydrolase alpha 2 subunit | acetylhydrolase alpha 2 subunit | |
| | | | (PAF- | (PAF-AH alpha 2) | |
| 747 | 23816 | AA956596 | | ESTs | e |
| 748 | 8494 | AI059968 | | ESTs | i, General |
| 749 | 21841 | AA996499 | | ESTs, Weakly similar to C1QB RAT | b, General |
| | | | | COMPLEMENT C1Q | |
| | | | | SUBCOMPONENT, B CHAIN | |
| | | | | PRECURSOR [R. norvegicus] | |
| 750 | 19765 | AI230945 | | ESTs, Highly similar to AF151862 1 | d |
| | | | | CGI-104 protein [H. sapiens] | |
| 751 | 6002 | AA818101 | | EST | b |
| 752 | 21945 | AI104132 | | ESTs | e |
| 753 | 4496 | AA892400 | | ESTs | i |
| 754 | 12921 | AI112636 | | ESTs, Moderately similar to | General |
| | | | | UDP_HUMAN URIDINE | |
| | | | | PHOSPHORYLASE [H. sapiens] | |
| 755 | 14516 | AI013197 | | ESTs, Weakly similar to coding | e |
| | | | | sequence of pol [R. norvegicus] | |
| 756 | 11504 | AI171652 | | ESTs | General |
| 757 | 3698 | AI172193 | | ESTs | e |
| 758 | 5886 | AI045807 | | ESTs | General |
| 759 | 4154 | AI009467 | | ESTs | General |
| 760 | 4330 | AA818747 | | ESTs | c, General |
| 390 | 16597 | AI102486 | | ESTs, Weakly similar to S37583 | General |
| | | | | RING finger protein rfp - mouse | |
| | | | | [M. musculus] | |
| 761 | 15191 | AI176456 | | Rat metallothionein-2 and | General |
| | | | | metallothionein-1 genes, complete | |
| | | | | cds | |
| 762 | 10654 | AI235991 | | Rattus norvegicus enhancer-of-split | f |
| | | | | and hairy-related protein 2 (SHARP- | |
| | | | | 2) mRNA, complete cds | |
| 763 | 14341 | AI227596 | | ESTs | General |
| 764 | 22915 | AI228299 | | ESTs, Highly similar to p97 | a, c, |
| | | | | homologous protein [H. sapiens] | General |
| 765 | 6638 | AI137579 | | ESTs | c, General |
| 766 | 25250 | D10706 | | | h |
| 767 | 24072 | AI231093 | | ESTs | e |
| 768 | 15628 | AI230338 | | ESTs, Highly similar to | General |
| | | | | RS16_HUMAN 40S RIBOSOMAL | |
| | | | | PROTEIN S1 [R. norvegicus] | |
| 769 | 18831 | AI104357 | | ESTs, Highly similar to ATRTC | c, h, |
| | | | | actin beta - rat [R. norvegicus] | General |
| 770 | 8343 | AI059502 | | ESTs | i |
| 771 | 7749 | AA848804 | | ESTs, Highly similar to BTF3 | General |
| | | | | MOUSE TRANSCRIPTION | |
| | | | | FACTOR BTF3 [M. musculus] | |
| 772 | 9984 | AA955536 | | ESTs, Weakly similar to ELL | General |
| | | | | MOUSE RNA POLYMERASE II | |
| | | | | ELONGATION FACTOR ELL | |
| | | | | [M. musculus] | |
| 773 | 17264 | D25233 | Retinoblastoma 1 (including | Retinoblastoma 1 (including | General |
| | | | osteosarcoma) | osteosarcoma) | |
| 774 | 5356 | AI177813 | | ESTs, Moderately similar to S27962 | General |
| | | | | modulator recognition factor 1 | |
| | | | | [H. sapiens] | |
| 775 | 8626 | AI059449 | | ESTs | General |
| 776 | 2522 | AA964957 | | ESTs | a |
| 777 | 6291 | AI144797 | | ESTs | h |
| 642 | 19085 | AA892598 | | ESTs | General |
| 778 | 18366 | AA799442 | | ESTs | General |
| 779 | 1686 | AI179971 | Hemoglobin, alpha 1 | Hemoglobin, alpha 1 | b, General |
| 780 | 20004 | AI031036 | | ESTs | c |
| 781 | 4969 | AI113008 | | ESTs, Moderately similar to | f, g, |
| | | | | megakaryocyte stimulating factor | General |
| | | | | [H. sapiens] | |
| 782 | 6697 | AI045340 | | ESTs | General |
| 783 | 13420 | AA892042 | | ESTs | d, h, |
| | | | | | General |
| 784 | 21527 | AA851733 | | ESTs | f |
| 785 | 22017 | AA944209 | | ESTs, Moderately similar to PIM1 | General |
| | | | | RAT PROTO-ONCOGENE | |
| | | | | SERINE/THREONINE-PROTEIN | |
| | | | | KINASE PIM-1 [R. norvegicus] | |
| 786 | 9388 | AA894173 | | ESTs | b |
| 787 | 23197 | AI172159 | | ESTs | General |
| 788 | 3518 | AA944584 | | ESTs | b, f |
| 422 | 18606 | X53504 | | ESTs, Highly similar to 60S | e, General |
| | | | | RIBOSOMAL PROTEIN L12 | |
| | | | | [R. norvegicus] | |
| 789 | 23123 | AA924794 | | ESTs | g, General |
| 790 | 3081 | AA999171 | Signal transducer and activator | Signal transducer and activator of | h |
| | | | of transcription 1 | transcription 1 | |
| 791 | 17358 | AI179147 | | ESTs, Highly similar to | e, h |
| | | | | ETFB_HUMAN ELECTRON | |
| | | | | TRANSFER FLAVOPROTEIN | |
| | | | | BETA-SUBUNIT [H. sapiens] | |
| 792 | 2435 | AI639411 | | ESTs, Highly similar to dJ149A16.6 | h |
| | | | | [H. sapiens] | |
| 793 | 24651 | M83678 | RAB13 | RAB13 | b |
| 794 | 17675 | AI137597 | | ESTs | f |
| 795 | 4407 | H33528 | | ESTs | General |
| 796 | 4874 | AA923850 | | ESTs | General |
| 797 | 16001 | AA866452 | actin, alpha, cardiac | actin, alpha, cardiac | a, b, c, g, |
| | | | | | General |
| 798 | 18883 | AA799992 | | ESTs | General |
| 799 | 10972 | AI233956 | | ESTs | General |
| 800 | 1114 | AI029917 | | Rat brain neuron-specific enolase | f |
| | | | | mRNA, complete cds | |
| 801 | 15382 | AI172302 | | ESTs, Weakly similar to S43056 | General |
| | | | | hypothetical protein - mouse | |
| | | | | [M. musculus] | |
| 802 | 15568 | AI010257 | | ESTs | General |
| 803 | 10532 | AI009602 | | ESTs | g, General |
| 804 | 11873 | AI232326 | | ESTs | General |
| 805 | 13161 | AI138093 | | ESTs | e |
| 806 | 11485 | AI235348 | | ESTs, Weakly similar to polycomb- | f |
| | | | | group protein [R. norvegicus] | |
| 807 | 25689 | X52815 | | | g, General |
| 808 | 1831 | AI071137 | | Rat mRNA for cdc25B, complete | a, b, |
| | | | | cds | General |
| 809 | 25846 | AI638988 | | | General |
| 810 | 20086 | AI013260 | lamin | lamin | g |
| 811 | 20041 | AI112161 | | ESTs | i, General |
| 812 | 18867 | D88250 | | Rattus norvegicus mRNA for serine | a, b, |
| | | | | protease, complete cds | General |
| 813 | 7615 | AI030163 | | ESTs | d |
| 814 | 23833 | AI113026 | | ESTs, Highly similar to AGP2_RAT | General |
| | | | | ANGIOPOIETIN-2 (ANG-2) | |
| | | | | [R. norvegicus] | |
| 815 | 23731 | AA894004 | | ESTs, Weakly similar to AF099929 | f, g, |
| | | | | 1 pervin [R. norvegicus] | General |
| 816 | 21400 | M36410 | sepiapterin reductase | sepiapterin reductase | General |
| 817 | 20763 | AA925516 | | ESTs | b |
| 818 | 15218 | AI102495 | | ESTs, Moderately similar to purine | General |
| | | | | nucleoside phosphorylase | |
| | | | | [M. musculus] | |
| 819 | 3088 | AI013369 | | ESTs | c |
| 820 | 10317 | AI172339 | | ESTs, Weakly similar to T21860 | General |
| | | | | hypothetical protein F36F2.1 - | |
| | | | | Caenorhabditis elegans [C. elegans] | |
| 821 | 17468 | AA892545 | | ESTs, Highly similar to multi- | d |
| | | | | membrane spanning polyspecific | |
| | | | | transporter [M. musculus] | |
| 822 | 23566 | AA955482 | | ESTs, Moderately similar to | General |
| | | | | AF132950 1 CGI-16 protein | |
| | | | | [H. sapiens] | |
| 823 | 15510 | AA875428 | | ESTs | g, General |
| 824 | 17408 | AA818971 | | ESTs | h |
| 825 | 16608 | AA996840 | | ESTs | h |
| 826 | 15308 | AI072896 | | ESTs, Weakly similar to neural | h |
| | | | | plakophilin related arm-repeat | |
| | | | | protein [M. musculus] | |
| 827 | 7397 | AI104244 | | Rattus norvegicus mRNA for | h |
| | | | | oligomycin sensitivity conferring | |
| | | | | protein, complete cds | |
| 828 | 18542 | AA893493 | | ESTs, Highly similar to RL26 RAT | e |
| | | | | 60S RIBOSOMAL PROTEIN L26 | |
| | | | | [R. norvegicus] | |
| 829 | 19094 | AI232021 | | ESTs, Highly similar to Human | e |
| | | | | Translation Initiation Factor Eif1, | |
| | | | | Nmr, 29 Structures [H. sapiens] | |
| 830 | 14449 | AI234152 | | ESTs | General |
| 831 | 12096 | AA819415 | | ESTs | i |
| 832 | 6135 | AA819065 | | ESTs | d |
| 833 | 21785 | AI177312 | | ESTs | g, General |
| 834 | 18454 | AI231776 | | ESTs, Highly similar to mRNA | General |
| | | | | cleavage factor I 25 kDa subunit | |
| | | | | [H. sapiens] | |
| 835 | 21581 | AA944828 | | ESTs | c, General |
| 836 | 15383 | AA955358 | | ESTs | General |
| 837 | 16071 | AA997821 | | ESTs | General |
| 838 | 16533 | AA998174 | | ESTs | g, General |
| 839 | 5950 | AI169266 | | ESTs, Moderately similar to | General |
| | | | | AR16_HUMAN | |
| | | | | ARP2/3 COMPLEX | |
| | | | | 16 KDA SUBUNIT [H. sapiens] | |
| 840 | 15004 | AI235224 | | Rattus norvegicus tissue inhibitor of | f, g, |
| | | | | metalloproteinase-1 (TIMP1), | General |
| | | | | mRNA, complete cds | |
| 798 | 18881 | AA799992 | | ESTs | a, General |
| 841 | 21185 | AI170056 | | ESTs | General |
| 842 | 5049 | D10655 | dihydrolipoamide | dihydrolipoamide acetyltransferase | e |
| | | | acetyltransferase | | |
| 843 | 17810 | AA799778 | | Rat F-0-ATPase subunit b mRNA, | i |
| | | | | complete cds | |
| 844 | 10071 | AI639058 | | ESTs, Moderately similar to | i, General |
| | | | | dJ718J7.1 [H. sapiens] | |
| 845 | 2913 | AI232272 | | ESTs, Weakly similar to T25417 | General |
| | | | | hypothetical protein T28D6.9 - | |
| | | | | Caenorhabditis elegans [C. elegans] | |
| 846 | 5703 | AI045136 | | ESTs | i, General |
| 847 | 3143 | AI232408 | | ESTs | General |
| 848 | 10780 | AI136555 | | Rattus norvegicus mRNA for | g, General |
| | | | | Castration Induced Prostatic | |
| | | | | Apoptosis Related protein-1 (CIPAR- | |
| | | | | 1) | |
| 849 | 5357 | AI179507 | | ESTs | b, General |
| 850 | 18909 | AA849426 | | ESTs, Weakly similar to | General |
| | | | | YLC4_CAEEL HYPOTHETICAL | |
| | | | | 81.0 KD PROTEIN C35D10.4 IN | |
| | | | | CHROMOSOME III [C. elegans] | |
| 321 | 22696 | AA945996 | | ESTs | General |
| 851 | 9815 | AA848218 | | ESTs | General |
| 852 | 20761 | AA900331 | | ESTs | General |
| 853 | 18686 | D00729 | dodecenoyl-Coenzyme A delta | Rat mRNA for delta3, delta2-enoyl- | e, h |
| | | | isomerase (3, 2 trans-enoyl- | CoA isomerase, dodecenoyl- | |
| | | | Coenyme A | Coenzyme A delta isomerase (3, 2 | |
| | | | | trans-enoyl-Coenyme A isomerase) | |
| 854 | 2378 | AA964501 | | ESTs | d |
| 855 | 17307 | H32747 | | ESTs | h |
| 856 | 10837 | AI072144 | | ESTs | General |
| 857 | 4130 | AA800298 | | ESTs | e, f, |
| | | | | | General |
| 858 | 18529 | AI230716 | | ESTs | g, General |
| 859 | 7362 | AI029026 | | ESTs | General |
| 860 | 2730 | AI012962 | | ESTs, Weakly similar to putative | General |
| | | | | prenylated protein [H. sapiens] | |
| 861 | 21766 | AA850916 | | ESTs | General |
| 862 | 13240 | AI169311 | | ESTs | d, General |
| 863 | 12664 | AA999110 | | ESTs, Weakly similar to | General |
| | | | | MAPE_HUMAN MELANOMA | |
| | | | | ANTIGEN PREFERENTIALLY | |
| | | | | EXPRESSED IN TUMORS | |
| | | | | [H. sapiens] | |
| 864 | 24520 | L20869 | | Rat pancreatitis associated protein | General |
| | | | | III (PAPIII0) mRNA, complete cds | |
| 865 | 10549 | AA801255 | | ESTs | General |
| 866 | 8737 | AI071926 | | ESTs | h |
| 867 | 12674 | AI235358 | | ESTs, Highly similar to UCR2 RAT | a, c |
| | | | | UBIQUINOL-CYTOCHROME C | |
| | | | | REDUCTASE COMPLEX CORE | |
| | | | | PROTEIN 2 PRECURSOR | |
| | | | | [R. norvegicus] | |
| 868 | 8032 | AI058398 | | ESTs | f |
| 869 | 2587 | AI232103 | | ESTs | General |
| 870 | 13547 | M63983 | Hypoxanthine phosphoribosyl | ESTs, Moderately similar to ICA2 | i |
| | | | transferase | MOUSE INTERCELLULAR | |
| | | | | ADHESION MOLECULE-2 | |
| | | | | PRECURSOR | |
| | | | | [M. musculus], Hypoxanthine | |
| | | | | phosphoribosyl transferase | |
| 871 | 2135 | AI010195 | | ESTs | General |
| 872 | 6881 | AI010169 | | ESTs | General |
| 873 | 5494 | AI044425 | | ESTs | General |
| 874 | 16834 | AA963324 | | ESTs | d |
| 875 | 5699 | AI045128 | | ESTs, Moderately similar to T50615 | General |
| | | | | hypothetical protein | |
| | | | | DKFZp761G1515.1 [H. sapiens] | |
| 876 | 6282 | AA819523 | | ESTs | c |
| 877 | 18598 | AI070775 | | ESTs | General |
| 878 | 5297 | AI170379 | | ESTs | General |
| 879 | 7867 | AI043695 | HHs: phosphoribosyl | Rattus norvegicus mRNA for | d |
| | | | pyrophosphate amidotransferase | amidophosphoribosyltransferase | |
| 880 | 6097 | AA818929 | | ESTs | General |
| 881 | 10115 | AI058890 | | ESTs | d |
| 882 | 3738 | AA998256 | | ESTs | General |
| 883 | 9770 | AI060016 | | ESTs | General |
| 884 | 18830 | AA964496 | | ESTs, Highly similar to ATRTC | g, h, |
| | | | | actin beta - rat [R. norvegicus] | General |
| 885 | 7161 | AI233407 | | ESTs, Weakly similar to S44853 | General |
| | | | | K12H4.3 protein - Caenorhabditis | |
| | | | | elegans [C. elegans] | |
| 886 | 19729 | AA818910 | | ESTs | General |
| 887 | 15524 | D13124 | HMm: RIKEN cDNA | Rattus norvegicus P2 mRNA for | b |
| | | | 1810041M08 gene | ATP synthase subunit c, complete | |
| | | | | cds | |
| 888 | 16679 | AI105268 | | ESTs | d |
| 889 | 19184 | AI178025 | | ESTs, Highly similar to TGIF | General |
| | | | | MOUSE 5′-TG-3′ INTERACTING | |
| | | | | FACTOR [M. musculus] | |
| 890 | 6015 | AA818158 | | ESTs | f |
| 891 | 21659 | AI010584 | | Rattus norvegicus interferon- | General |
| | | | | inducible protein variant 10 mRNA, | |
| | | | | complete cds | |
| 892 | 18612 | AI228624 | | ESTs, Highly similar to | General |
| | | | | RL23_HUMAN 60S RIBOSOMAL | |
| | | | | PROTEIN L23 [R. norvegicus] | |
| 893 | 19291 | AA963933 | | EST | General |
| 732 | 21583 | S77900 | | ESTs | c, General |
| 894 | 7888 | AI233583 | HHs: arginyl-tRNA synthetase | ESTs, Moderately similar to | h |
| | | | | SYR_HUMAN ARGINYL-TRNA | |
| | | | | SYNTHETASE [H. sapiens] | |
| 895 | 21079 | AA800245 | | ESTs, Weakly similar to T09013 | f |
| | | | | RING finger protein Fxy - mouse | |
| | | | | [M. musculus] | |
| 896 | 17949 | AI011480 | | ESTs, Highly similar to RAB/Rip | g, i |
| | | | | protein [M. musculus] | |
| 897 | 4089 | AI180251 | | ESTs | d |
| 898 | 3823 | AI233147 | | ESTs, Weakly similar to nuclear | General |
| | | | | RNA helicase [R. norvegicus] | |
| 899 | 17506 | AI070068 | | ESTs, Weakly similar to 2104282A | General |
| | | | | Gadd45 gene [R. norvegicus] | |
| 900 | 21667 | AI013773 | | ESTs | General |
| 901 | 8919 | AI103388 | | ESTs, Weakly similar to | g, i, |
| | | | | ARF6_HUMAN ADP- | General |
| | | | | RIBOSYLATION FACTOR 6 | |
| | | | | [R. norvegicus] | |
| 902 | 24064 | AA957480 | | ESTs | h |
| 903 | 5902 | AI045871 | | ESTs, Moderately similar to | i |
| | | | | inhibitor of MyoD family-a | |
| | | | | [M. musculus] | |
| 904 | 7913 | AI043849 | | ESTs, Weakly similar to ELL | General |
| | | | | MOUSE RNA POLYMERASE II | |
| | | | | ELONGATION FACTOR ELL | |
| | | | | [M. musculus] | |
| 905 | 2980 | AI177761 | | ESTs, Weakly similar to LMP1 RAT | b |
| | | | | LYSOSOME-ASSOCIATED | |
| | | | | MEMBRANE GLYCOPROTEIN 1 | |
| | | | | PRECURSOR [R. norvegicus] | |
| 906 | 8477 | AI179167 | | ESTs | General |
| 907 | 11203 | AA892554 | | ESTs, Highly similar to ras-GTPase- | General |
| | | | | activating protein SH3-domain | |
| | | | | binding protein [M. musculus] | |
| 908 | 22150 | AA893607 | | ESTs | General |
| 909 | 10185 | H33426 | | ESTs | g |
| 910 | 15626 | X17665 | | ESTs, Highly similar to | f, h, |
| | | | | RS16_HUMAN 40S RIBOSOMAL | General |
| | | | | PROTEIN S1 [R. norvegicus] | |
| 911 | 2096 | AI233801 | | ESTs | h |
| 912 | 1809 | AA946503 | | Rat mRNA for alpha-2u globulin- | f |
| | | | | related protein | |
| 913 | 23501 | AA955251 | | ESTs | General |
| 914 | 23927 | AA957007 | glutathione S-transferase, mu 5 | glutathione S-transferase, mu 5 | e |
| 915 | 6205 | AI104907 | TEMO | TEMO | e |
| 916 | 8822 | AI070158 | | ESTs, Moderately similar to AD08 | i |
| | | | | MOUSE ADAM 8 PRECURSOR | |
| | | | | [M. musculus] | |
| 917 | 5754 | AA850738 | | ESTs | General |
| 918 | 21822 | AI228642 | | ESTs, Highly similar to seven | h |
| | | | | transmembrane domain protein | |
| | | | | [H. sapiens] | |
| 919 | 19075 | AI236473 | | ESTs, Moderately similar to | General |
| | | | | cysteine-rich hydrophobic 1 | |
| | | | | [M. musculus] | |
| 920 | 2361 | AA875512 | | R. norvegicus epsilon 3 globin gene | a |
| 921 | 4420 | AI171916 | | ESTs | g, General |
| 922 | 3819 | AI176209 | Tyrosine 3- | Tyrosine 3- | General |
| | | | monooxygenase/tryptophan 5- | monooxygenase/tryptophan 5- | |
| | | | monooxygenase activation | monooxygenase activation protein, | |
| | | | protein, zeta polypeptide | zeta polypeptide | |
| 923 | 22042 | AA946476 | | ESTs | i, General |
| 924 | 3016 | AA818069 | | Rat mRNA for polyubiquitin (four | a, f |
| | | | | repetitive ubiquitins in tandem), | |
| | | | | complete cds | |
| 925 | 22487 | AI102578 | | ESTs, Highly similar to I49523 | General |
| | | | | Mouse primary response gene B94 | |
| | | | | mRNA, 3′end - mouse [M. musculus] | |
| 926 | 5507 | AI176584 | | Rattus norvegicus insulin-like | General |
| | | | | growth factor binding protein 5 | |
| | | | | mRNA, 3′ UTR | |
| 927 | 22077 | AI177099 | | ESTs, Highly similar to serine | General |
| | | | | protease [H. sapiens] | |
| 928 | 25386 | L37970 | | | b |
| 929 | 13930 | AA800613 | | Rattus norvegicus gene for TIS11, | General |
| | | | | complete cds | |
| 930 | 11484 | AI179612 | | ESTs, Moderately similar to MY16 | General |
| | | | | MOUSE MYELOID | |
| | | | | DIFFERENTIATION PRIMARY | |
| | | | | RESPONSE PROTEIN MYD116 | |
| | | | | [M. musculus], Rattus norvegicus | |
| | | | | progression elevated gene 3 protein | |
| | | | | mRNA, complete cds | |
| 931 | 3417 | AI012337 | | ESTs, Highly similar to NHPX RAT | g, General |
| | | | | NHP2/RS6 FAMILY PROTEIN | |
| | | | | YEL026W HOMOLOG | |
| | | | | [R. norvegicus] | |
| 932 | 14677 | AI234620 | | EST | c |
| 933 | 2134 | AA894212 | | ESTs, Weakly similar to T20899 | a |
| | | | | hypothetical protein F14F3.3 - | |
| | | | | Caenorhabditis elegans [C. elegans] | |
| 586 | 17203 | AI171844 | HMm: RIKEN cDNA 2410043G19 | Rattus norvegicus F1-ATPase | b, e |
| | | | gene | epsilon subunit mRNA, nuclear | |
| | | | | gene encoding mitochondrial | |
| | | | | protein, complete cds | |
| 934 | 13291 | AI137286 | | ESTs | General |
| 935 | 22899 | AA956555 | | ESTs | General |
| 936 | 19913 | AI639155 | | ESTs | General |
| 937 | 1097 | AF016296 | | Rattus norvegicus neuropilin | General |
| | | | | mRNA, complete cds | |
| 938 | 4594 | Y07704 | | Rattus norvegicus mRNA Best5 | e, General |
| | | | | protein | |
| 939 | 22146 | AA893980 | | ESTs | General |
| 940 | 13382 | AI101527 | | ESTs, Highly similar to | a, g |
| | | | | SR19_HUMAN SIGNAL | |
| | | | | RECOGNITION PARTICLE 19 KD | |
| | | | | PROTEIN [H. sapiens] | |
| 941 | 2399 | AI030247 | | ESTs | General |
| 942 | 17644 | AA924036 | | ESTs | General |
| 943 | 895 | AI009614 | | ESTs | General |
| 944 | 1802 | AA817841 | | ESTs | c |
| 945 | 3003 | AA997330 | | ESTs | d, General |
| 946 | 9757 | AI170693 | | ESTs | c |
| 947 | 23583 | AI234819 | | ESTs | General |
| 948 | 8886 | AI233766 | | ESTs, Weakly similar to protease | f, General |
| | | | | [R. norvegicus] | |
| 949 | 24185 | AA893708 | | ESTs, Highly similar to T00333 | h |
| | | | | hypothetical protein KIAA0560 | |
| | | | | [H. sapiens] | |
| 950 | 22929 | AI071578 | | ESTs, Moderately similar to | General |
| | | | | NEURONAL PROTEIN 3.1 | |
| | | | | [M. musculus] | |
| 951 | 18271 | AA925267 | | ESTs, Highly similar to KIAA0740 | e |
| | | | | protein [H. sapiens] | |
| 952 | 3773 | AA998356 | | ESTs, Weakly similar to | General |
| | | | | BCL3_HUMAN B-CELL | |
| | | | | LYMPHOMA 3-ENCODED | |
| | | | | PROTEIN [H. sapiens] | |
| 953 | 18108 | X62528 | | R.rattus mRNA for ribonuclease | f |
| | | | | inhibitor | |
| 954 | 6176 | AA819657 | | EST | a |
| 955 | 14250 | AA799729 | Phosphodiesterase 4B, cAMP- | ESTs, Phosphodiesterase 4B, | General |
| | | | specific (dunce (Drosophila)- | cAMP-specific (dunce (Drosophila)- | |
| | | | homolog phosphodiesterase E4) | homolog phosphodiesterase E4) | |
| 956 | 22948 | AI105421 | | ESTs | d |
| 957 | 10991 | AI104342 | | ESTs | b |
| 958 | 11563 | AI102560 | | ESTs | a |
| 959 | 25669 | X07314 | | | a, b |
| 960 | 9277 | AI072424 | | ESTs, Highly similar to AF155568 1 | i |
| | | | | NSAP1 protein [H. sapiens] | |
| 961 | 13467 | AI138034 | UDP-glucose: ceramide | UDP-glucose: ceramide | General |
| | | | glycosyltransferase | glycosyltransferase | |
| 962 | 11516 | AI103962 | | ESTs | h |
| 963 | 20110 | AF071204 | stem cell factor KL-1 precursor | stem cell factor KL-1 precursor | b |
| 964 | 19320 | AA891666 | melanoma antigen, family D, 1 | melanoma antigen, family D, 1 | i |
| 965 | 13029 | AI179391 | | ESTs | d, General |
| 966 | 10348 | AI069934 | | EST | e |
| 967 | 8495 | AI059971 | | ESTs, Weakly similar to TNRC | d, g, i, |
| | | | | MOUSE LYMPHOTOXIN-BETA | General |
| | | | | RECEPTOR PRECURSOR | |
| | | | | [M. musculus] | |
| 968 | 14968 | K02815 | | Rat mRNA for RT1.B-1(alpha) chain | General |
| | | | | of integral membrane protein | |
| 969 | 19358 | AI009675 | | EST | a, b, |
| | | | | General | |
| 970 | 4031 | AI176989 | | ESTs | a |
| 971 | 19005 | AI175875 | | ESTs | d |
| 972 | 21661 | AI176479 | | Rattus norvegicus interferon- | b, f, |
| | | | | inducible protein variant 10 mRNA, | General |
| | | | | complete cds | |
| 973 | 13596 | U90261 | SH3 domain-containing adapter | SH3 domain-containing adapter | c, h |
| | | | protein | protein | |
| 974 | 11724 | AI102812 | | ESTs | a, b, |
| | | | | | General |
| 975 | 2042 | AI101921 | | ESTs | General |
| 976 | 25632 | U75405 | | | e |
| 977 | 10227 | AI102248 | | ESTs | h, General |
| 978 | 7224 | AI009820 | | ESTs | h |
| 979 | 2131 | AI171091 | | ESTs, Weakly similar to T19999 | h |
| | | | | hypothetical protein C47D12.2 - | |
| | | | | Caenorhabditis elegans [C. elegans] | |
| 980 | 20055 | AI230762 | | ESTs, Weakly similar to CLP3 RAT | General |
| | | | | CALPONIN, ACIDIC ISOFORM | |
| | | | | [R. norvegicus] | |
| 981 | 18897 | AA875207 | | Rat major beta-globin mRNA, | d |
| | | | | complete cds | |
| 982 | 18468 | AA859966 | | ESTs, Weakly similar to Edp1 | General |
| | | | | protein [M. musculus] | |
| 983 | 22820 | AA848315 | HMm: inosine 5′-phosphate | ESTs, Weakly similar to guanosine | General |
| | | | dehydrogenase 2 | monophosphate reductase | |
| | | | | [R. norvegicus] | |
| 984 | 17901 | AA944355 | | ESTs, Moderately similar to | General |
| | | | | AF155103 1 NY-REN-25 antigen | |
| | | | | [H. sapiens] | |
| 985 | 8305 | AI111695 | | ESTs | a |
| 986 | 14842 | AI237724 | | ESTs | General |
| | 26167 | AI044866 | | | General |
| 987 | 10097 | AI639425 | | ESTs | f, General |
| 988 | 6861 | AI176970 | | ESTs | h |
| 989 | 18859 | AA799467 | | ESTs | g |
| 990 | 21510 | AA851620 | | ESTs | General |
| 991 | 3561 | AB020504 | | Rattus norvegicus mRNA for | General |
| | | | | PMF31, complete cds | |
| 992 | 22898 | AA901107 | | ESTs | General |
| 993 | 14668 | AI012185 | | ESTs | c |
| 994 | 23035 | AA945712 | | ESTs | d |
| 995 | 6330 | AI170426 | | ESTs | b |
| 996 | 3808 | AI008643 | | ESTs, Weakly similar to heat shock | General |
| | | | | protein hsp40-3 [M. musculus] | |
| 997 | 10334 | AI060295 | | ESTs, Moderately similar to small | a |
| | | | | GTP-binding protein rab5 | |
| | | | | [R. norvegicus] | |
| 998 | 22762 | D89730 | | ESTs, Weakly similar to AF137350 | c, General |
| | | | | 1 embryonic vascular EGF repeat- | |
| | | | | containing protein EVEC | |
| | | | | [R. norvegicus] | |
| 999 | 15837 | AI010411 | | ESTs, ESTs, Moderately similar to | g |
| | | | | NADH-ubiquinone oxidoreductase | |
| | | | | B14.5B subunit [H. sapiens] | |
| 1000 | 4169 | AI009669 | | ESTs, Weakly similar to HIGH | General |
| | | | | AFFINITY IMMUNOGLOBULIN | |
| | | | | EPSILON RECEPTOR BETA- | |
| | | | | SUBUNIT [R. norvegicus] | |
| 1001 | 22596 | AA955298 | | ESTs | General |
| 1002 | 11483 | AF020618 | | ESTs, Moderately similar to MY16 | General |
| | | | | MOUSE MYELOID | |
| | | | | DIFFERENTIATION PRIMARY | |
| | | | | RESPONSE PROTEIN MYD116 | |
| | | | | [M. musculus], Rattus norvegicus | |
| | | | | progression elevated gene 3 protein | |
| | | | | mRNA, complete cds | |
| 1003 | 17540 | AA955914 | | EST, EST, Moderately similar to | General |
| | | | | FBRL MOUSE FIBRILLARIN | |
| | | | | [M. musculus], ESTs, Highly similar | |
| | | | | to FBRL MOUSE FIBRILLARIN | |
| | | | | [M. musculus] | |
| 1004 | 26030 | M34331 | | | e |
| 1005 | 15569 | Z78279 | | R. norvegicus mRNA for collagen | c, e |
| | | | | alpha 1 type I | |
| 1006 | 22378 | AA944212 | | ESTs | General |
| 1007 | 23155 | AA926016 | | ESTs, Weakly similar to RING | i |
| | | | | finger protein terf [R. norvegicus] | |
| 1008 | 4832 | AA800190 | | ESTs, Highly similar to glycogen | General |
| | | | | phosphorylase [R. norvegicus] | |
| 1009 | 18774 | AI010279 | | ESTs | a, i |
| 1010 | 21798 | AA926365 | | ESTs, Moderately similar to | b |
| | | | | AF151827 1 CGI-69 protein | |
| | | | | [H. sapiens] | |
| 1011 | 3392 | AA998205 | | ESTs | d |
| 1012 | 9796 | AI071990 | | Rattus norvegicus pEachy mRNA, | General |
| | | | | complete cds | |
| 1013 | 16314 | AA859348 | | ESTs | General |
| 1014 | 2757 | AA997851 | | ESTs | c, General |
| 1015 | 4636 | AA899491 | HMm: tryptophanyl-tRNA | ESTs, Highly similar to SYW | i |
| | | | synthetase | MOUSE TRYPTOPHANYL-TRNA | |
| | | | | SYNTHETASE [M. musculus] | |
| 1016 | 21644 | AI179609 | | ESTs | General |
| 480 | 11727 | AA849518 | | ESTs | d |
| 1017 | 345 | AI059916 | Signal transducer and activator | Signal transducer and activator of | f |
| | | | of transcription 3 | transcription 3 | |
| 1018 | 22773 | AA859885 | | ESTs | c |
| 1019 | 2767 | AA963201 | | ESTs | General |
| 1020 | 22036 | AI070141 | | ESTs, Highly similar to CD97 | General |
| | | | | protein [M. musculus] | |
| 1021 | 8580 | AI060314 | | EST | c |
| 1022 | 9362 | AI102706 | | ESTs | General |
| 1023 | 10659 | AI103059 | | ESTs | General |
| 1024 | 16549 | AA892270 | | ESTs | a |
| 1025 | 2254 | AI235325 | | ESTs | h, General |
| 1026 | 12366 | AI232088 | | ESTs | General |
| 1027 | 20897 | AI175812 | | ESTs, Highly similar to Copa | General |
| | | | | protein [M. musculus] | |
| 1028 | 13270 | AI228760 | | ESTs | d |
| 1029 | 12031 | AA893860 | HHs: threonyl-tRNA synthetase | ESTs, Moderately similar to | General |
| | | | | SYTC_HUMAN | |
| | | | | THREONYL-TRNA | |
| | | | | SYNTHETASE, CYTOPLASMIC | |
| | | | | [H. sapiens] | |
| 1030 | 16859 | AI236753 | | ESTs | General |
| 1031 | 6982 | AI170793 | | ESTs, Highly similar to titin-like | General |
| | | | | protein [H. sapiens] | |
| 1032 | 15518 | AI072945 | | ESTs | General |
| 1033 | 8612 | AI058527 | | ESTs | a, b, |
| | | | | | General |
| 1034 | 14289 | AA891838 | | ESTs, Highly similar to muscle | b |
| | | | | protein 684 [M. musculus] | |
| 580 | 22248 | AA943537 | | Rattus norvegicus zyxin mRNA, | General |
| | | | | partial cds | |
| 1035 | 12303 | AA944786 | | ESTs | d |
| 1036 | 17632 | AI102472 | | ESTs | c |
| 1037 | 19722 | AI013508 | | Rattus norvegicus Hsp70 binding | General |
| | | | | protein HspBP mRNA, complete | |
| | | | | cds | |
| 1038 | 15051 | AI236332 | | ESTs, Highly similar to ATDA | General |
| | | | | MOUSE DIAMINE | |
| | | | | ACETYLTRANSFERASE | |
| | | | | [M. musculus] | |
| 1039 | 7273 | AI234712 | | ESTs | f |
| 1040 | 15879 | AI228313 | | ESTs | General |
| 1041 | 10020 | AI045632 | | ESTs | f, General |
| 1042 | 22432 | AI171263 | | ESTs, Highly similar to FBRL | g, General |
| | | | | MOUSE FIBRILLARIN | |
| | | | | [M. musculus] | |
| 1043 | 25705 | X59375 | | | General |
| 1044 | 4696 | AI237009 | | ESTs | c |
| 1045 | 18673 | AA849028 | | ESTs, Highly similar to PRC8 RAT | d |
| | | | | PROTEASOME COMPONENT C8 | |
| | | | | [R. norvegicus] | |
| 1046 | 13166 | AI178736 | | ESTs | b |
| 1047 | 24128 | AA849766 | | ESTs, Highly similar to hypothetical | c |
| | | | | protein [H. sapiens] | |
| 1048 | 24042 | AI230002 | | ESTs | General |
| 1049 | 9339 | AI101160 | | ESTs, Weakly similar to S46930 | General |
| | | | | teg292 protein - mouse | |
| | | | | [M. musculus] | |
| 1050 | 15190 | AI102562 | | Rat metallothionein-i (mt-1) mrna | General |
| 1051 | 3433 | AI030339 | | ESTs | General |
| 1052 | 4459 | AA891721 | | ESTs | General |
| 1053 | 19012 | AI172056 | | ESTs | General |
| 1054 | 2802 | D85435 | | Rattus norvegicus mRNA for protein | c |
| | | | | kinase C delta-bindig protein, | |
| | | | | complete cds | |
| 1055 | 14763 | AA944481 | | ESTs, Weakly similar to FIBA RAT | General |
| | | | | FIBRINOGEN ALPHA/ALPHA-E | |
| | | | | CHAIN PRECURSOR | |
| | | | | [R. norvegicus] | |
| 1056 | 9583 | AI071185 | | ESTs | d, General |
| 1057 | 10394 | AA943564 | | ESTs, Weakly similar to T27118 | General |
| | | | | hypothetical protein Y53C10A.5 - | |
| | | | | Caenorhabditis elegans [C. elegans] | |
| 1058 | 16821 | AA999042 | | ESTs | General |
| 1059 | 3718 | AI229643 | | ESTs | General |
| 1060 | 8022 | AI058357 | | ESTs | General |
| 1061 | 19840 | AA899197 | | Rattus norvegicus mRNA for | g, General |
| | | | | poly(A) binding protein (pabp1 | |
| | | | | gene) | |
| 1062 | 15215 | AI060260 | | ESTs | d |
| 1063 | 8053 | AI175033 | | ESTs | General |
| 1064 | 12086 | AA801116 | | ESTs | c |
| 1065 | 21447 | AI009608 | | ESTs, Highly similar to orf | d |
| | | | | [M. musculus] | |
| 1066 | 4232 | AI012958 | | ESTs | General |
| 1067 | 12978 | X96437 | | ESTs, Highly similar | General |
| | | | | to RADIATION- | |
| | | | | INDUCIBLE IMMEDIATE-EARLY | |
| | | | | GENE IEX-1 [M. musculus] | |
| 1068 | 1031 | AA892863 | | ESTs | d |
| 1069 | 18682 | AI059499 | | ESTs, Highly similar to chaperonin | h |
| | | | | containing TCP-1 theta subunit | |
| | | | | [M. musculus] | |
| 1070 | 25806 | E00898 | | | g |
| 1071 | 4432 | AI101851 | | ESTs | d |
| 1072 | 2997 | AI030545 | | ESTs | i, General |
| 1073 | 6936 | AI010593 | | ESTs | d |
| 1074 | 11684 | AI010917 | | ESTs | g, General |
| 1075 | 804 | AI169756 | | ESTs, Highly similar to GENE 33 | General |
| | | | | POLYPEPTIDE [R. norvegicus] | |
| 1076 | 15192 | AI101099 | | Rat metallothionein-2 and | General |
| | | | | metallothionein-1 genes, complete | |
| | | | | cds | |
| 1077 | 19145 | AA964613 | | ESTs | f |
| 1078 | 3887 | AA893307 | | EST | a |
| 1079 | 13539 | AI177280 | | ESTs, Moderately similar to A45304 | General |
| | | | | granulocyte/macrophage colony- | |
| | | | | stimulating factor receptor, low | |
| | | | | affinity, precursor - mouse | |
| | | | | [M. musculus] | |
| 1080 | 5258 | AA926089 | | ESTs, Highly similar to similar to | d |
| | | | | human DNA-binding protein 5 | |
| | | | | [H. sapiens] | |
| 1081 | 17380 | AA799612 | ubiquitin conjugating enzyme | ubiquitin conjugating enzyme | h |
| 544 | 11530 | AA799773 | | ESTs, Highly similar to gamma- | i |
| | | | | filamin [H. sapiens] | |
| 1082 | 8541 | AI112310 | | ESTs, Highly similar to hypothetical | d |
| | | | | protein [H. sapiens] | |
| 1083 | 15876 | AA892582 | | ESTs, Highly similar to | e, h |
| | | | | RL8_HUMAN 60S RIBOSOMAL | |
| | | | | PROTEIN L [R. norvegicus] | |
| 1084 | 7806 | AA818421 | | ESTs | General |
| 1085 | 19011 | AI102618 | | ESTs | General |
| 1086 | 8938 | AI070590 | | ESTs | General |
| 1087 | 13266 | AI172326 | | ESTs | General |
| 1088 | 22765 | AI176265 | | ESTs | General |
| 1089 | 22196 | U21719 | | ESTs | General |
| 1090 | 6789 | AA998207 | | ESTs | i, General |
| 1091 | 1287 | AI172299 | | ESTs | f, General |
| 1092 | 13985 | AA819429 | | EST | e |
| 1093 | 5887 | AI179099 | | ESTs, Moderately similar to Vanin-1 | b |
| | | | | [M. musculus] | |
| 1094 | 15189 | M11794 | | | General |
| 1095 | 657 | AI010262 | | Rattus norvegicus mRNA for | General |
| | | | | inetrleukin-4 receptor (membrane- | |
| | | | | bound form), complete cds | |
| 1096 | 14554 | U48828 | | R. norvegicus H1SHR mRNA, Rattus | f, i, General |
| | | | | norvegicus retroviral-like ovarian | |
| | | | | specific transcript 30-1 mRNA | |
| 1097 | 23096 | AA924352 | | ESTs, Weakly similar to Prostatic | a, b |
| | | | | Acid Phosphatase [R. norvegicus] | |
| 1098 | 7120 | AI012393 | | ESTs, Weakly similar to RING | a, b |
| | | | | finger protein terf [R. norvegicus] | |
| 1099 | 13033 | AI113076 | | ESTs | c |
| 1100 | 12745 | AI011799 | | ESTs | a, General |
| 1101 | 8759 | AI237646 | | ESTs | General |
| 950 | 22930 | AI071578 | | ESTs, Moderately similar to | e |
| | | | | NEURONAL PROTEIN 3.1 | |
| | | | | [M. musculus] | |
| 1102 | 4490 | AA851184 | | Rattus norvegicus mRNA for | General |
| | | | | cathepsin Y, partial cds | |
| 1103 | 600 | AA800222 | | ESTs | c, e |
| 779 | 1687 | AI179971 | Hemoglobin, alpha 1 | Hemoglobin, alpha 1 | a, b, |
| | | | | | General |
| 1104 | 23139 | AI180040 | | ESTs | d, f |
| 1105 | 11876 | AI009321 | | ESTs, Highly similar to similar to | General |
| | | | | human DNA-binding protein 5 | |
| | | | | [H. sapiens] | |
| 1106 | 13568 | AA800169 | | ESTs | General |
| 1107 | 25671 | X07686 | | | e |
| 1108 | 2410 | AA964589 | | EST | General |
| 1109 | 23230 | AI236146 | | ESTs | d |
| 766 | 15134 | D10706 | | ESTs, Highly similar to OAZ RAT | c |
| | | | | ORNITHINE DECARBOXYLASE | |
| | | | | ANTIZYME [R. norvegicus] | |
| 1110 | 6166 | AI136516 | | ESTs | General |
| 1111 | 12066 | AA800566 | | ESTs | c |
| 684 | 17947 | AA944581 | | ESTs, Highly similar to RAB/Rip | i |
| | | | | protein [M. musculus] | |
| 371 | 19256 | M15562 | | Rat (diabetic BB) MHC class II | f, General |
| | | | | alpha chain RT1.D alpha (u) | |
| 1112 | 23210 | H31420 | | ESTs | h |
| 1113 | 5844 | AA944367 | | ESTs, Highly similar to N- | General |
| | | | | acetylglucosamine-phosphate | |
| | | | | mutase [H. sapiens] | |
| 1114 | 2992 | AI171776 | | ESTs | General |
| 1115 | 8515 | AA849917 | | ESTs | a, b |
| 1116 | 21974 | AA945769 | | ESTs, Highly similar to T43483 | a |
| | | | | translation initiation factor IF-2 | |
| | | | | homolog [H. sapiens] | |
| 1117 | 11896 | AA997845 | | ESTs, Highly similar to protein | a |
| | | | | kinase Dyrk2 [H. sapiens] | |
| 1118 | 10820 | AI009411 | | ESTs, Highly similar to RS3 | e, General |
| | | | | MOUSE 40S RIBOSOMAL | |
| | | | | PROTEIN S3 [R. norvegicus] | |
| 1119 | 6532 | AI234105 | | ESTs | General |
| 1120 | 6274 | AA819206 | | ESTs | General |
| 1121 | 23099 | AI112365 | | ESTs, Highly similar to mm-Mago | General |
| | | | | [M. musculus] | |
| 1122 | 12898 | AI105049 | | ESTs | General |
| 1123 | 22011 | AI176212 | | ESTs, Weakly similar to T25165 | General |
| | | | | hypothetical protein T23D8.3 - | |
| | | | | Caenorhabditis elegans [C. elegans] | |
| 1124 | 14693 | AI234830 | | ESTs, Weakly similar to | General |
| | | | | YK61_YEAST HYPOTHETICAL | |
| | | | | 39.6 KDA PROTEIN IN MTD1- | |
| | | | | NUP133 INTERGENIC REGION | |
| | | | | [S. cerevisiae] | |
| 1125 | 12107 | AI172460 | | ESTs | d |
| 1126 | 3799 | AF002281 | | Rattus norvegicus alpha-actinin-2 | f, General |
| | | | | associated LIM protein mRNA, | |
| | | | | complete cds | |
| 1127 | 14955 | AA945750 | | ESTs | d |
| 1128 | 14862 | AI236048 | | EST | f |
| 1129 | 9317 | AI029174 | | ESTs | h |
| 1130 | 24028 | AI180239 | | ESTs | General |
| 1131 | 16081 | AI179610 | Heme oxygenase | Heme oxygenase | General |
| 1132 | 25918 | AI639204 | | | e |
| 1133 | 15042 | AI179422 | | ESTs | General |
| 1134 | 11242 | AI179260 | | ESTs | General |
| 1135 | 18018 | D12771 | | Rattus norvegicus mRNA for | i |
| | | | | mitochondrial adenine nuleotide | |
| | | | | translocator | |
| 1136 | 6655 | AA850688 | | ESTs | f |
| 1137 | 10182 | AI176185 | | ESTs, Highly similar to P55-C-FOS | General |
| | | | | PROTO-ONCOGENE PROTEIN | |
| | | | | [R. norvegicus] | |
| 1138 | 20990 | AI176509 | | ESTs, Weakly similar to | i |
| | | | | KPCN_HUMAN | |
| | | | | PROTEIN KINASE | |
| | | | | C, NU TYPE (NPKC-NU) | |
| | | | | (PROTEIN KINASE EPK2) | |
| | | | | [H. sapiens] | |
| 1139 | 12118 | AA892775 | Lysozyme | Lysozyme | g |
| 1140 | 4355 | AI103410 | | ESTs | General |

[0185] TABLE 2
Attorney Docket No. 44921-5090US Document No. 1828250.1

| Seq. ID | | GenBank | | Model |
|---|---|---|---|---|
| No. | Identifier | Acc. No. | Pathways | Code |
| 894 | 7888 | AI233583 | Aminoacyl-tRNA biosynthesis, Arginine and | h |
| | | | proline metabolism | |
| 1029 | 12031 | AA893860 | Aminoacyl-tRNA biosynthesis, Glycine, serine | General |
| | | | and threonine metabolism | |
| 1015 | 4636 | AA899491 | Aminoacyl-tRNA biosynthesis, Tryptophan | i |
| | | | metabolism | |
| 138 | 17100 | NM_022179 | Aminosugars metabolism, Fructose and | h, General |
| | | | mannose metabolism, Galactose | |
| | | | metabolism, Glycolysis/ | |
| | | | Gluconeogenesis, Starch and sucrose | |
| | | | metabolism | |
| 138 | 17101 | NM_022179 | Aminosugars metabolism, Fructose and | General |
| | | | mannose metabolism, Galactose | |
| | | | metabolism, Glycolysis/ | |
| | | | Gluconeogenesis, Starch and sucrose | |
| | | | metabolism | |
| 168 | 9929 | NM_024392 | Androgen and estrogen metabolism | g |
| 56 | 19392 | NM_012998 | Arginine and proline metabolism | i |
| 149 | 20915 | NM_022407 | Arginine and proline metabolism, Ascorbate and | General |
| | | | aldarate metabolism, Bile acid | |
| | | | biosynthesis, Butanoate metabolism, Fatty acid | |
| | | | metabolism, Glycerolipid metabolism, Histidine | |
| | | | metabolism, Lysine degradation, Propanoate | |
| | | | metabolism, Pyruvate metabolism, Tryptophan | |
| | | | metabolism, Valine, leucine and isoleucine | |
| | | | degradation, beta-Alanine metabolism | |
| 16 | 4468 | NM_012529 | Arginine and proline metabolism, Urea cycle and | e |
| | | | metabolism of amino groups | |
| 25 | 23523 | NM_012615 | Arginine and proline metabolism, Urea cycle and | General |
| | | | metabolism of amino groups | |
| 152 | 4242 | NM_022521 | Arginine and proline metabolism, Urea cycle and | f |
| | | | metabolism of amino groups | |
| 13 | 7063 | NM_012495 | Carbon fixation, Fructose and mannose | c |
| | | | metabolism, Glycolysis/ | |
| | | | Gluconeogenesis, Inositol metabolism, Pentose | |
| | | | phosphate cycle | |
| 667 | 17289 | AA891785 | Citrate cycle (TCA cycle), Glutathione | b |
| | | | metabolism, Reductive carboxylate cycle (CO2 | |
| | | | fixation) | |
| 92 | 24106 | NM_017141 | DNA polymerase, Purine metabolism, Pyrimidine | c |
| | | | metabolism | |
| 92 | 24107 | NM_017141 | DNA polymerase, Purine metabolism, Pyrimidine | General |
| | | | metabolism | |
| 200 | 12581 | NM_031514 | epo, ifn_gamma, il3, il6, interact6-1, pdgf, tpo | i, General |
| 257 | 13005 | NM_053623 | Fatty acid metabolism | General |
| 311 | 20984 | D90109 | Fatty acid metabolism | h |
| 400 | 20983 | AI044900 | Fatty acid metabolism | General |
| 853 | 18686 | D00729 | Fatty acid metabolism | e, h |
| 324 | 23596 | AI105435 | Fatty acid metabolism, Lysine | c, General |
| | | | degradation, Tryptophan metabolism | |
| 115 | 1174 | NM_019184 | Fatty acid metabolism, Tryptophan metabolism | b |
| 203 | 4011 | NM_031543 | Fatty acid metabolism, Tryptophan metabolism | a |
| 144 | 13480 | NM_022390 | Folate biosynthesis | f |
| 816 | 21400 | M36410 | Folate biosynthesis | General |
| 12 | 15511 | NM_012498 | Fructose and mannose metabolism, Galactose | h |
| | | | metabolism, Glycerolipid metabolism, Pentose | |
| | | | and glucuronate interconversions, Pyruvate | |
| | | | metabolism | |
| 68 | 1321 | NM_013098 | Galactose metabolism, Glycolysis/ | a |
| | | | Gluconeogenesis, Starch and sucrose | |
| | | | metabolism | |
| 86 | 11152 | NM_017073 | Glutamate metabolism, Nitrogen metabolism | General |
| 86 | 11153 | NM_017073 | Glutamate metabolism, Nitrogen metabolism | General |
| 879 | 7867 | AI043695 | Glutamate metabolism, Purine metabolism | d |
| 40 | 961 | NM_012796 | Glutathione metabolism | e |
| 914 | 23927 | AA957007 | Glutathione metabolism | e |
| 194 | 1638 | NM_031143 | Glycerolipid metabolism | General |
| 746 | 14149 | AA998172 | Glycerolipid metabolism | i |
| 176 | 23109 | NM_031000 | Glycerolipid metabolism, Glycolysis/ | c, f, h |
| | | | Gluconeogenesis, Pentose and glucuronate | |
| | | | interconversions | |
| 398 | 1893 | X51529 | Glycerolipid metabolism, Phospholipid | General |
| | | | degradation, Prostaglandin and leukotriene | |
| | | | metabolism | |
| 78 | 16448 | NM_013197 | Glycine, serine and threonine metabolism | a, b, |
| | | | | General |
| 236 | 4093 | NM_053290 | Glycolysis/Gluconeogenesis | General |
| 18 | 19408 | NM_012554 | Glycolysis/Gluconeogenesis, Phenylalanine, | h |
| | | | tyrosine and tryptophan biosynthesis | |
| 213 | 21575 | NM_031698 | Glycoprotein biosynthesis | b |
| 132 | 574 | NM_019905 | Glyoxylate and dicarboxylate metabolism | g, i |
| | | | | General |
| 23 | 24716 | NM_012589 | il6, interact6-1 | General |
| 163 | 21239 | NM_024125 | il6, interact6-1 | c, General |
| 77 | 1714 | NM_013187 | Inositol phosphate metabolism | g, i, |
| | | | | General |
| 15 | 15741 | NM_012520 | Methane metabolism, Tryptophan metabolism | c, g |
| 71 | 2005 | NM_013127 | Nicotinate and nicotinamide metabolism | c |
| 124 | 15056 | NM_019291 | Nitrogen metabolism | General |
| 197 | 18597 | NM_031325 | Nucleotide sugars metabolism, Pentose and | General |
| | | | glucuronate interconversions, Starch and | |
| | | | sucrose metabolism | |
| 39 | 449 | NM_012786 | Oxidative phosphorylation | a, b |
| 101 | 14696 | NM_017202 | Oxidative phosphorylation | e |
| 452 | 15048 | M24542 | Oxidative phosphorylation | c, i |
| 130 | 22727 | NM_019383 | Oxidative phosphorylation, Type III protein | i |
| | | | secretion system | |
| 586 | 17204 | AI171844 | Oxidative phosphorylation, Type III protein | e, g |
| | | | secretion system | |
| 887 | 15524 | D13124 | Oxidative phosphorylation, Type III protein | b |
| | | | secretion system | |
| 586 | 17203 | AI171844 | Oxidative phosphorylation, Type III protein | b, e |
| | | | secretion system | |
| 614 | 23038 | AA900881 | Pantothenate and CoA biosynthesis, Valine, | General |
| | | | leucine and isoleucine biosynthesis, Valine, | |
| | | | leucine and isoleucine degradation | |
| 20 | 16080 | NM_012580 | Porphyrin and chlorophyll metabolism | General |
| 1131 | 16081 | AI179610 | Porphyrin and chlorophyll metabolism | General |
| 103 | 20193 | NM_017232 | Prostaglandin and leukotriene metabolism | General |
| 114 | 17066 | NM_019170 | Prostaglandin and leukotriene metabolism | e |
| 178 | 1845 | NM_031010 | Prostaglandin and leukotriene metabolism | a, b, |
| | | | | General |
| 178 | 25517 | NM_031010 | Prostaglandin and leukotriene metabolism | a, b, |
| | | | | General |
| 205 | 692 | NM_031557 | Prostaglandin and leukotriene metabolism | h |
| 107 | 3254 | NM_017282 | Proteasome | h |
| 616 | 3988 | AI008546 | Proteasome | d |
| 88 | 8888 | NM_017090 | Purine metabolism | General |
| 97 | 21975 | NM_017154 | Purine metabolism | General |
| 217 | 14184 | NM_031776 | Purine metabolism | General |
| 217 | 14185 | NM_031776 | Purine metabolism | General |
| 289 | 15843 | NM_080910 | Purine metabolism | h |
| 377 | 14384 | AI177096 | Purine metabolism | c |
| 870 | 13547 | M63983 | Purine metabolism | i |
| 955 | 14250 | AA799729 | Purine metabolism | General |
| 983 | 22820 | AA848315 | Purine metabolism | General |
| 79 | 20826 | NM_013218 | Pyrimidine metabolism | h |
| 208 | 24235 | NM_031614 | Pyrimidine metabolism | General |
| 561 | 17285 | J02827 | Valine, leucine and isoleucine degradation | General |

[0186] TABLE 3
Attorney Docket No. 44921-5090US Document No. 1828250.1

| Seq. ID | | GenBank | Homologous Human | | Model |
|---|---|---|---|---|---|
| No. | Identifier | Acc. No. | Genes | Homologous Human Cluster Title | Code |
| 1 | 25319 | J01435 | | EST, Moderately similar to 0806162C protein | a, c, f |
| | | | | COI [M. musculus], EST, Moderately similar to | |
| | | | | 810024C cytochrome oxidase I [H. sapiens], | |
| | | | | ESTs, Moderately similar to 0806162C protein | |
| | | | | COI [M. musculus], ESTs, Moderately similar to | |
| | | | | 810024C cytochrome oxidase I [H. sapiens] | |
| 1 | 25050 | J01435 | | EST, Moderately similar to 0806162C protein | c, f, g |
| | | | | COI [M. musculus], EST, Moderately similar to | |
| | | | | 810024C cytochrome oxidase I [H. sapiens], | |
| | | | | ESTs, Moderately similar to 0806162C protein | |
| | | | | COI [M. musculus], ESTs, Moderately similar to | |
| | | | | 810024C cytochrome oxidase I [H. sapiens] | |
| 2 | 25051 | J01436 | | | a, c |
| 3 | 25439 | M35826 | | | a, c, f, g |
| 4 | 16132 | AA850885 | | EST, Moderately similar to 0806162C protein | a, c |
| | | | | COI [M. musculus], EST, Moderately similar to | |
| | | | | 810024C cytochrome oxidase I [H. sapiens], | |
| | | | | ESTs, Moderately similar to 0806162C protein | |
| | | | | COI [M. musculus], ESTs, Moderately similar to | |
| | | | | 810024C cytochrome oxidase I [H. sapiens] | |
| 5 | 6153 | AA875531 | collagen, type I, alpha 2, | EST, Moderately similar to 0806162B | e |
| | | | procollagen, type I, alpha 2 | cytochrome b [M. musculus], EST, Moderately | |
| | | | | similar to 810024B cytochrome b [H. sapiens], | |
| | | | | EST, Weakly similar to 0806162B cytochrome | |
| | | | | b [M. musculus], EST, Weakly similar to | |
| | | | | 0812187A cytochrome b [R. norvegicus], EST, | |
| | | | | Weakly similar to 810024M URF 6 [H. sapiens], | |
| | | | | EST, Weakly similar to [Segment 1 of 2] | |
| | | | | COLLAGEN ALPHA 1(I) CHAIN [R. norvegicus], | |
| | | | | ESTs, Weakly similar to CA1F_HUMAN | |
| | | | | COLLAGEN ALPHA 1(XVI) CHAIN | |
| | | | | PRECURSO [H. sapiens], Mus musculus, | |
| | | | | Similar to RIKEN cDNA 1700051I12 gene, | |
| | | | | clone MGC: 28741 IMAGE: 4481590, mRNA, | |
| | | | | complete cds, RIKEN cDNA 1700051I12 gene, | |
| | | | | chordin, collagen, type XVI, alpha 1, expressed | |
| | | | | sequence AI835009, hypothetical protein | |
| | | | | FLJ14547, procollagen, type II, alpha 1 | |
| 6 | 15666 | AA892248 | | | a, f |
| 7 | 19421 | AA945152 | dimethylarginine | EST, Moderately similar to 0806162A ATPase | a, c |
| | | | dimethylaminohydrolase 1 | 6 [M. musculus], EST, Weakly similar to | |
| | | | | 0806162A ATPase 6 [M. musculus], ESTs, | |
| | | | | Moderately similar to DDH1 RAT NG, NG- | |
| | | | | DIMETHYLARGININE | |
| | | | | DIMETHYLAMINOHYDROLASE 1 | |
| | | | | [R. norvegicus], ESTs, Weakly similar to DDH1 | |
| | | | | RAT NG, NG-DIMETHYLARGININE | |
| | | | | DIMETHYLAMINOHYDROLASE 1 | |
| | | | | [R. norvegicus], dimethylarginine | |
| | | | | dimethylaminohydrolase 1 | |
| 8 | 14981 | AI103396 | | EST, Moderately similar to 0806162B | a, c, f |
| | | | | cytochrome b [M. musculus], EST, Moderately | |
| | | | | similar to 810024B cytochrome b [H. sapiens], | |
| | | | | EST, Weakly similar to 0806162B cytochrome | |
| | | | | b [M. musculus], EST, Weakly similar to | |
| | | | | 0812187A cytochrome b [R. norvegicus], EST, | |
| | | | | Weakly similar to 810024M URF 6 [H. sapiens] | |
| 9 | 14982 | AI171355 | | EST, Moderately similar to 0806162B | a, f |
| | | | | cytochrome b [M. musculus], EST, Moderately | |
| | | | | similar to 810024B cytochrome b [H sapiens], | |
| | | | | EST, Weakly similar to 0806162B cytochrome | |
| | | | | b [M. musculus], EST, Weakly similar to | |
| | | | | 0812187A cytochrome b [R. norvegicus], EST, | |
| | | | | Weakly similar to 810024M URF 6 [H. sapiens] | |
| 10 | 14983 | AI179150 | | EST, Moderately similar to 0806162B | a, c, f |
| | | | | cytochrome b [M. musculus], EST, Moderately | |
| | | | | similar to 810024B cytochrome b [H. sapiens], | |
| | | | | EST, Weakly similar to 0806162B cytochrome | |
| | | | | b [M. musculus], EST, Weakly similar to | |
| | | | | 0812187A cytochrome b [R. norvegicus], EST, | |
| | | | | Weakly similar to 810024M URF 6 [H. sapiens] | |
| 11 | 21152 | X14848 | golgi SNAP receptor | Homo sapiens, Similar to golgi SNAP receptor | a, b, c, |
| | | | complex member 1 | complex member 1, clone MGC: 13657 | f, g |
| | | | | IMAGE: 4250494, mRNA, complete cds, golgi | |
| | | | | SNAP receptor complex member 1 | |
| 12 | 15511 | NM_012498 | aldo-keto reductase | | h |
| | | | family 1, member B1 | | |
| | | | (aldose reductase), aldo- | | |
| | | | keto reductase family 1, | | |
| | | | member B3 (aldose | | |
| | | | reductase) | | |
| 13 | 7063 | NM_012495 | aldolase 1, A isoform, | EST, Moderately similar to ADHUA fructose- | c |
| | | | aldolase A, fructose- | bisphosphate aldolase [H. sapiens], EST, | |
| | | | bisphosphate | Weakly similar to ADHUA fructose- | |
| | | | | bisphosphate aldolase [H. sapiens], EST, | |
| | | | | Weakly similar to I39435 fructose-bisphosphate | |
| | | | | aldolase [H. sapiens], ESTs, Moderately similar | |
| | | | | to aldolase A [M. musculus], Homo sapiens, | |
| | | | | aldolase 1, A isoform, clone MGC: 18171 | |
| | | | | IMAGE: 4155253, mRNA, complete cds, RIKEN | |
| | | | | cDNA 4933425L11 gene, aldolase 1, A isoform, | |
| | | | | aldolase 3, C isoform, aldolase A, fructose- | |
| | | | | bisphosphate | |
| 14 | 7427 | NM_012515 | benzodiazapine receptor | Human DNA sequence from clone 34B21 on | h |
| | | | (peripheral), | chromosome 6p12.1-21.1. Contains part of a | |
| | | | benzodiazepine receptor, | gene for a novel protein with ZU5 domain | |
| | | | peripheral | similar to part of Tight Junction Protein ZO1 | |
| | | | | (TJP1) and UNC5 Homologs, the gene for a | |
| | | | | novel BZRP (peripheral benzodiazapine | |
| | | | | receptor (MBR, PBR, PBKS, IBP, Isoquinoline- | |
| | | | | binding protein)) LIKE protein, the gene for a | |
| | | | | novel protein similar to part of APOBEC1 | |
| | | | | (Phorbolin 1, Apolipoprotein B mRNA editing | |
| | | | | protein), and the NFYA gene for nuclear | |
| | | | | transcription factor Y, alpha (CCAAT-Binding | |
| | | | | transcription factor subunit B, CBF-B, CAAT- | |
| | | | | Box DNA binding protein subunit A). Contains | |
| | | | | ESTs, STSs, GSSs, two putative CpG islands | |
| | | | | and a ca repeat polymorphism, RIKEN cDNA | |
| | | | | 25127D2 gene, benzodiazapine receptor | |
| | | | | (peripheral), benzodiazepine receptor, | |
| | | | | peripheral | |
| 15 | 15741 | NM_012520 | catalase, catalase 1 | Homo sapiens cDNA FLJ1272 fis, clone | c, g |
| | | | | HEMBB12371, catalase, catalase 1 | |
| 16 | 4468 | NM_012529 | creatine kinase, brain | EST, Moderately similar to CREATINE | e |
| | | | | KINASE, B CHAIN [R. norvegicus], EST, | |
| | | | | Weakly similar to KIHUCB creatine kinase | |
| | | | | [H. sapiens], creatine kinase, brain | |
| 17 | 23869 | NM_012551 | early growth response 1 | ESTs, Weakly similar to 153869 zinc finger | General |
| | | | | protein - mouse [M. musculus], early growth | |
| | | | | response 1, repressor of GATA, testis zinc | |
| | | | | finger protein | |
| 18 | 19408 | NM_012554 | enolase 1, (alpha), | EST, Moderately similar to ALPHA ENOLASE | h |
| | | | enolase 1, alpha non- | [R. norvegicus], EST, Weakly similar to A2917 | |
| | | | neuron | phosphopyruvate hydratase [H. sapiens], Homo | |
| | | | | sapiens cDNA FLJ12774 fis, clone | |
| | | | | NT2RP21663, moderately similar to ENOLASE | |
| | | | | (EC 4.2.1.11), enolase 1, (alpha), enolase 1, | |
| | | | | alpha non-neuron, enolase alpha, lung-specific, | |
| | | | | expressed sequence AI42712 | |
| 19 | 6477 | NM_012559 | fibrinogen, gamma | EST, Moderately similar to FGHUGB fibrinogen | g |
| | | | polypeptide | gamma-B chain precursor [H. sapiens], EST, | |
| | | | | Moderately similar to Recombinant Human | |
| | | | | Gamma-Fibrinogen Carboxyl Terminal | |
| | | | | Fragment [H. sapiens], ESTs, Weakly similar to | |
| | | | | FIBG RAT FIBRINOGEN GAMMA-A/-B CHAIN | |
| | | | | PRECURSOR [R. norvegicus], RIKEN cDNA | |
| | | | | 1117F23 gene, expressed sequence AI33526, | |
| | | | | fibrinogen, gamma polypeptide, fibrinogen-like | |
| | | | | 1, ficolin A, ficolin B | |
| 20 | 16080 | NM_012580 | heme oxygenase | heme oxygenase (decycling) 1 | General |
| | | | (decycling) 1 | | |
| 21 | 20313 | NM_012585 | 5-hydroxytryptamine | 5-hydroxytryptamine (serotonin) receptor 1A, | General |
| | | | (serotonin) receptor 1A | protein “A” | |
| 22 | 15098 | NM_012588 | insulin-like growth factor | insulin-like growth factor binding protein 3, | c |
| | | | binding protein 3 | protease, serine, 11 (lgf binding) | |
| 23 | 24716 | NM_012589 | interleukin 6, interleukin 6 | interleukin 6, interleukin 6 (interferon, beta 2) | General |
| | | | (interferon, beta 2) | | |
| 24 | 2629 | NM_012603 | myelocytomatosis | RIKEN cDNA 292K7 gene, myelocytomatosis | General |
| | | | oncogene, v-myc avian | oncogene, v-myc avian myelocytomatosis viral | |
| | | | myelocytomatosis viral | oncogene homolog | |
| | | | oncogene homolog | | |
| 25 | 23523 | NM_012615 | ornithine decarboxylase | ESTs, Weakly similar to A Chain A, Crystal | General |
| | | | 1, ornithine | Structure Ornithine Decarboxylase From | |
| | | | decarboxylase, structural | Mouse, Truncated 37 Residues From The C- | |
| | | | | Terminus, To 1.6 Angstrom Resolution | |
| | | | | [M. musculus], ESTs, Weakly similar to | |
| | | | | ORNITHINE DECARBOXYLASE | |
| | | | | [R. norvegicus], ornithine decarboxylase 1, | |
| | | | | ornithine decarboxylase antizyme inhibitor, | |
| | | | | ornithine decarboxylase, structural, ornithine | |
| | | | | decarboxylase-like protein | |
| 26 | 20589 | NM_012618 | S1 calcium binding | S1 calcium binding protein A3, S1 calcium- | General |
| | | | protein A4, S1 calcium- | binding protein A2, S1 calcium-binding protein | |
| | | | binding protein A4 | A3, S1 calcium-binding protein A4, S1 calcium- | |
| | | | (calcium protein, | binding protein A4 (calcium protein, calvasculin, | |
| | | | calvasculin, metastasin, | metastasin, murine placental homolog) | |
| | | | murine placental | | |
| | | | homolog) | | |
| 27 | 15540 | NM_012620 | serine (or cysteine) | serine (or cysteine) proteinase inhibitor, clade E | General |
| | | | proteinase inhibitor, clade | (nexin, plasminogen activator inhibitor type 1), | |
| | | | E (nexin, plasminogen | member 1 | |
| | | | activator inhibitor type 1), | | |
| | | | member 1 | | |
| 28 | 18725 | NM_012645 | | | c |
| 28 | 18726 | NM_012645 | | | General |
| 29 | 9423 | NM_012649 | syndecan 4, syndecan 4 | syndecan 4, syndecan 4 (amphiglycan, | General |
| | | | (amphiglycan, ryudocan) | ryudocan) | |
| 29 | 9424 | NM_012649 | syndecan 4, syndecan 4 | syndecan 4, syndecan 4 (amphiglycan, | General |
| | | | (amphiglycan, ryudocan) | ryudocan) | |
| 30 | 16224 | NM_012656 | secreted acidic cysteine | EST, Moderately similar to SPARC | c |
| | | | rich glycoprotein, | PRECURSOR [R. norvegicus], SPARC-like 1 | |
| | | | secreted protein, acidic, | (mast9, hevin), secreted acidic cysteine rich | |
| | | | cysteine-rich | glycoprotein, secreted protein, acidic, cysteine- | |
| | | | (osteonectin) | rich (osteonectin) | |
| 31 | 1514 | NM_012678 | | ESTs, Highly similar to S7282 tropomyosin | c, h, |
| | | | | TM3-pl, fibroblast [H. sapiens], ESTs, | General |
| | | | | Moderately similar to alpha-tropomyosin slow | |
| | | | | [M. musculus], RIKEN cDNA 18159A23 gene, | |
| | | | | tropomyosin 4 | |
| 32 | 20776 | NM_012680 | tuberous sclerosis 2 | DKFZp566D133 protein, EST, Moderately | General |
| | | | | similar to TSC2_HUMAN TUBERIN | |
| | | | | [H. sapiens], Homo sapiens cDNA FLJ12339 fis, | |
| | | | | clone MAMMA1225, KIAA1272 protein, tuberin- | |
| | | | | like protein 1, tuberous sclerosis 2 | |
| 33 | 25650 | NM_012736 | glycerol phosphate | expressed sequence AA48484, expressed | f |
| | | | dehydrogenase 1, | sequence AI448216, glycerol phosphate | |
| | | | mitochondrial, glycerol-3- | dehydrogenase 1, mitochondrial, glycerol-3- | |
| | | | phosphate | phosphate dehydrogenase 2 (mitochondrial) | |
| | | | dehydrogenase 2 | | |
| | | | (mitochondrial) | | |
| 34 | 344 | NM_012747 | | Signal transducer and activator of transcription | b |
| | | | | 1, signal transducer and activator of | |
| | | | | transcription 1, signal transducer and activator | |
| | | | | of transcription 1, 91 kD, signal transducer and | |
| | | | | activator of transcription 3, signal transducer | |
| | | | | and activator of transcription 3 (acute-phase | |
| | | | | response factor) | |
| 35 | 8829 | NM_012749 | | | h, General |
| 36 | 3601 | NM_012751 | | ESTs, Highly similar to GTR4_HUMAN | d |
| | | | | GLUCOSE TRANSPORTER TYPE 4, INSULIN- | |
| | | | | RESPONSIV [H. sapiens], solute carrier family | |
| | | | | 2 (facilitated glucose transporter), member 1, | |
| | | | | solute carrier family 2 (facilitated glucose | |
| | | | | transporter), member 4, solute carrier family 2 | |
| | | | | (facilitated glucose transporter), member 6 | |
| 37 | 15174 | NM_012756 | | ESTs, Highly similar to 1312358A IGF II | b |
| | | | | receptor [H. sapiens], expressed sequence | |
| | | | | AI661837, insulin-like growth factor 2 receptor | |
| 38 | 1349 | NM_012776 | adrenergic receptor | G protein-coupled receptor kinase 2, groucho | General |
| | | | kinase, beta 1, | gene related (Drosophila), G protein-coupled | |
| | | | adrenergic, beta, receptor | receptor kinase 5, G protein-coupled receptor | |
| | | | kinase 1 | kinase 6, adrenergic, beta, receptor kinase 1, | |
| | | | | rhodopsin kinase | |
| 39 | 449 | NM_012786 | | EST, Moderately similar to CYTOCHROME C | a, b |
| | | | | OXIDASE POLYPEPTIDE VIII-HEART | |
| | | | | PRECURSOR [R. norvegicus], EST, Weakly | |
| | | | | similar to COXQ MOUSE CYTOCHROME C | |
| | | | | OXIDASE POLYPEPTIDE VIII-HEART | |
| | | | | PRECURSOR [M. musculus], cytochrome c | |
| | | | | oxidase subunit VIII, cytochrome c oxidase, | |
| | | | | subunit VIIIb | |
| 40 | 961 | NM_012796 | glutathione S-transferase | ESTs, Highly similar to GTT2 RAT | e |
| | | | theta 2, glutathione S- | GLUTATHIONE S-TRANSFERASE YRS-YRS | |
| | | | transferase, theta 2 | [R. norvegicus], Homo sapiens mRNA; cDNA | |
| | | | | DKFZp762N226 (from clone DKFZp762N226), | |
| | | | | expressed sequence AI266894, glutathione S- | |
| | | | | transferase theta 2, glutathione S-transferase, | |
| | | | | theta 2, hypothetical protein | |
| 41 | 15032 | NM_012816 | | alpha-methylacyl-CoA racemase, hypothetical | g, i |
| | | | | protein FLJ1188 | |
| 42 | 18109 | NM_012823 | | EST, Weakly similar to ANXA_HUMAN | General |
| | | | | ANNEXIN XI [H. sapiens], annexin A1, annexin | |
| | | | | A3 | |
| 43 | 11137 | NM_012839 | cytochrome c, | ESTs, Highly similar to 63485A cytochrome c | g |
| | | | cytochrome c, somatic | [H. sapiens], ESTs, Weakly similar to | |
| | | | | CYTOCHROME C, SOMATIC [M. musculus], | |
| | | | | Homo sapiens pseudogene for cytochrome c- | |
| | | | | like protein, clone pHGC4E1, Human DNA | |
| | | | | sequence from clone RP11-169O17 on | |
| | | | | chromosome 13 Contains ESTs, GSSs, STSs | |
| | | | | and four CpG islands. Contains a novel protein | |
| | | | | similar to cytochrome c, part of a novel gene | |
| | | | | similar to TPTE encoding a transmembrane | |
| | | | | phosphatase with tensin homology and the | |
| | | | | ADPRTL1 gene encoding ADP- | |
| | | | | ribosyltransferase (NAD+; poly (ADP-ribose) | |
| | | | | polymerase)-like protein 1 (vault protein, | |
| | | | | KIAA177), cytochrome c, cytochrome c, | |
| | | | | somatic | |
| 44 | 17541 | NM_012844 | epoxide hydrolase 1, | EST, Moderately similar to HYEP_HUMAN | a, c, |
| | | | microsomal, epoxide | EPOXIDE HYDROLASE 1 [H. sapiens], ESTs, | General |
| | | | hydrolase 1, microsomal | Highly similar to HYEP_HUMAN EPOXIDE | |
| | | | (xenobiotic) | HYDROLASE 1 [H. sapiens], epoxide hydrolase | |
| | | | | 1, microsomal, epoxide hydrolase 1, | |
| | | | | microsomal (xenobiotic) | |
| 45 | 17305 | NM_012876 | ribosomal protein S29 | EST, Highly similar to 4S RIBOSOMAL | b, e, g |
| | | | | PROTEIN S29 [R. norvegicus], EST, | |
| | | | | Moderately similar to RS29_HUMAN 4S | |
| | | | | RIBOSOMAL PROTEIN S29 [M. musculus], | |
| | | | | EST, Weakly similar to 4S RIBOSOMAL | |
| | | | | PROTEIN S29 [R. norvegicus], ESTs, Highly | |
| | | | | similar to RS29_HUMAN 4S RIBOSOMAL | |
| | | | | PROTEIN S29 [H. sapiens], ESTs, Weakly | |
| | | | | similar to RS29_HUMAN 4S RIBOSOMAL | |
| | | | | PROTEIN S29 [H. sapiens], ribosomal protein | |
| | | | | S29 | |
| 46 | 1748 | NM_012889 | vascular cell adhesion | immunoglobulin superfamily, member 1, mRNA | a, General |
| | | | molecule 1 | for 1-gicerin/MUC18, mucosal vascular | |
| | | | | addressin cell adhesion molecule 1, vascular | |
| | | | | cell adhesion molecule 1 | |
| 47 | 16721 | NM_012891 | acyl-Coenzyme A | EST, Weakly similar to ACYL-COA | General |
| | | | dehydrogenase, very long | DEHYDROGENASE, VERY-LONG-CHAIN | |
| | | | chain | SPECIFIC PRECURSOR [R. norvegicus], | |
| | | | | ESTs, Weakly similar to ACYL-COA | |
| | | | | DEHYDROGENASE, VERY-LONG-CHAIN | |
| | | | | SPECIFIC PRECURSOR [R. norvegicus], NPD2 | |
| | | | | protein, RIKEN cDNA 2617P15 gene, acyl | |
| | | | | Coenzyme A dehydrogenase, very long chain | |
| 48 | 16274 | NM_012898 | alpha-2-HS-glycoprotein | alpha-2-HS-glycoprotein | a |
| 49 | 24783 | NM_012914 | ATPase, Ca++ | ATPase, Ca++ transporting, cardiac muscle, | h, General |
| | | | transporting, ubiquitous | fast twitch 1, ATPase, Ca++ transporting, | |
| | | | | cardiac muscle, slow twitch 2, ATFase, Ca++ | |
| | | | | transporting, ubiquitous, expressed sequence | |
| | | | | AW61228 | |
| 50 | 18695 | NM_012931 | | CD2-associated protein, HEF like Protein, | b, General |
| | | | | Homo sapiens cDNA FLJ14854 fis, clone | |
| | | | | PLACE1972, breast cancer anti-estrogen | |
| | | | | resistance 1, enhancer of filamentation 1 (cas- | |
| | | | | like docking; Crk-associated substrate related), | |
| | | | | neural precursor cell expressed, | |
| | | | | developmentally down-regulated gene 9, v-crk- | |
| | | | | associated tyrosine kinase substrate | |
| 51 | 2555 | NM_012967 | intercellular adhesion | Homo sapiens mRNA; cDNA DKFZp434E516 | General |
| | | | molecule, intercellular | (from clone DKFZp434E516), intercellular | |
| | | | adhesion molecule 1 | adhesion molecule, intercellular adhesion | |
| | | | (CD54), human rhinovirus | molecule 1 (CD54), human rhinovirus receptor, | |
| | | | receptor | intercellular adhesion molecule 3, intercellular | |
| | | | | adhesion molecule 5, telencephalin | |
| 52 | 24528 | NM_012973 | potassium voltage-gated | potassium voltage-gated channel, lsk-related | h |
| | | | channel, lsk-related | family, member 1, potassium voltage-gated | |
| | | | family, member 1, | channel, lsk-related subfamily, member 1 | |
| | | | potassium voltage-gated | | |
| | | | channel, lsk-related | | |
| | | | subfamily, member 1 | | |
| 53 | 956 | NM_012976 | | ESTs, Highly similar to LEG9 RAT GALECTIN- | a, General |
| | | | | 9 [R. norvegicus], ESTs, Highly similar to | |
| | | | | LEG9_HUMAN GALECTIN-9 [H. sapiens], | |
| | | | | ESTs, Weakly similar to LEG9 RAT GALECTIN- | |
| | | | | 9 [R. norvegicus], expressed sequence | |
| | | | | AI265545, lectin, galactose binding, soluble 12, | |
| | | | | lectin, galactose binding, soluble 9, lectin, | |
| | | | | galactoside-binding, soluble, 9 (galectin 9) | |
| 54 | 958 | NM_012977 | | ESTs, Highly similar to LEG9 RAT GALECTIN- | General |
| | | | | 9 [R. norvegicus], ESTs, Highly similar to | |
| | | | | LEG9_HUMAN GALECTIN-9 [H. sapiens], | |
| | | | | ESTs, Weakly similar to LEG9 RAT GALECTIN- | |
| | | | | 9 [R. norvegicus], expressed sequence | |
| | | | | AI265545, lectin, galactose binding, soluble 12, | |
| | | | | lectin, galactose binding, soluble 9, lectin, | |
| | | | | galactoside-binding, soluble, 9 (galectin 9) | |
| 55 | 17394 | NM_012992 | nucleophosmin (nucleolar | ESTs, Moderately similar to NPM_HUMAN | General |
| | | | phosphoprotein B23, | NUCLEOPHOSMIN [H. sapiens], ESTs, Weakly | |
| | | | numatrin), nucleophosmin 1 | similar to NPM_HUMAN NUCLEOPHOSMIN | |
| | | | | [H. sapiens], nucleophosmin (nucleolar | |
| | | | | phosphoprotein B23, numatrin), nucleophosmin | |
| | | | | 1, nucleophosmin/nucleoplasmin 3, | |
| | | | | nucleoplasmin 3 | |
| 56 | 19392 | NM_012998 | procollagen-proline, 2- | RIKEN cDNA 177B13 gene, RIKEN cDNA | i |
| | | | oxoglutarate 4- | 18141F13 gene, RIKEN cDNA 18147B9 gene, | |
| | | | dioxygenase (proline 4- | expressed sequence AI661267, procollagen- | |
| | | | hydroxylase), beta | proline, 2-oxoglutarate 4-dioxygenase (proline 4 | |
| | | | polypeptide (protein | hydroxylase), beta polypeptide (protein disulfide | |
| | | | disulfide isomerase; | isomerase; thyroid hormone binding protein | |
| | | | thyroid hormone binding | p55) | |
| | | | protein p55), prolyl 4- | | |
| | | | hydroxylase, beta | | |
| | | | polypeptide | | |
| 57 | 24264 | NM_012999 | paired basic amino acid | EST, Highly similar to PAC4 RAT SUBTILISIN- | e |
| | | | cleaving system 4, | LIKE PROTEASE PACE4 PRECURSOR | |
| | | | proprotein convertase | [R. norvegicus], Homo sapiens clone 1 | |
| | | | subtilisin/kexin type 6 | thrombospondin mRNA, complete cds, RIKEN | |
| | | | | cDNA A9329K19 gene, paired basic amino acid | |
| | | | | cleaving system 4, proprotein convertase | |
| | | | | subtilisin/kexin type 6 | |
| 58 | 3405 | NM_013011 | | EST, Weakly similar to 143B_HUMAN 14-3-3 | i, General |
| | | | | PROTEIN BETA/ALPHA [H. sapiens], ESTs, | |
| | | | | Highly similar to A Chain A, 14-3-3 | |
| | | | | ZetaPHOSPHOPEPTIDE COMPLEX | |
| | | | | [H. sapiens], makorin, ring finger protein, 3, | |
| | | | | stratifin, tyrosine 3-monooxgenase/tryptophan 5 | |
| | | | | monooxgenase activation protein, beta | |
| | | | | polypeptide, tyrosine 3- | |
| | | | | monooxygenase/tryptophan 5-monooxygenase | |
| | | | | activation protein, zeta polypeptide | |
| 59 | 20229 | NM_013018 | RAB3A, member RAS | Homo sapiens, clone MGC: 4711 | General |
| | | | oncogene family | IMAGE: 3534915, mRNA, complete cds, | |
| | | | | RAB3A, member RAS oncogene family, | |
| | | | | RAB3C, member RAS oncogene family, RIKEN | |
| | | | | cDNA 261528C18 gene | |
| 60 | 1606 | NM_013039 | ATP-binding cassette, | ATP-binding cassette, sub-family C | g |
| | | | sub-family C | (CFTR/MRP), member 8, ATP-binding | |
| | | | (CFTR/MRP), member 8 | cassette, sub-family C (CFTR/MRP), member | |
| | | | | 9, EST, Moderately similar to ACC8 RAT | |
| | | | | SULFONYLUREA RECEPTOR 1 | |
| | | | | [R. norvegicus], EST, Weakly similar to MRP5 | |
| | | | | MOUSE MULTIDRUG RESISTANCE- | |
| | | | | ASSOCIATED PROTEIN 5 [M. musculus], | |
| | | | | ESTs, Highly similar to ACC8_HUMAN | |
| | | | | SULFONYLUREA RECEPTOR 1 [H. sapiens], | |
| | | | | ESTs, Weakly similar to T42728 sulfonylurea | |
| | | | | receptor 2, isoform B - mouse [M. musculus], | |
| | | | | Mus musculus adult male pituitary gland cDNA, | |
| | | | | RIKEN full-length enriched library, | |
| | | | | clone: 533439B14, full insert sequence | |
| 61 | 730 | NM_013040 | ATP-binding cassette, | ATP-binding cassette, sub-family C | h |
| | | | sub-family C | (CFTR/MRP), member 8, ATP-binding | |
| | | | (CFTR/MRP), member 9 | cassette, sub-family C (CFTR/MRP), member | |
| | | | | 9, ESTs, Highly similar to ACC8_HUMAN | |
| | | | | SULFONYLUREA RECEPTOR 1 [H. sapiens], | |
| | | | | ESTs, Weakly similar to T42728 sulfonylurea | |
| | | | | receptor 2, isoform B - mouse [M. musculus], | |
| | | | | Mus musculus adult male pituitary gland cDNA, | |
| | | | | RIKEN full-length enriched library, | |
| | | | | clone: 533439B14, full insert sequence | |
| 62 | 17401 | NM_013043 | transforming growth factor | ESTs, Moderately similar to DIP_HUMAN DIP | g, General |
| | | | beta 1 induced transcript | PROTEIN [H. sapiens], delta sleep inducing | |
| | | | 4, transforming growth | peptide, immunoreactor, glucocorticoid-induced | |
| | | | factor beta-stimulated | leucine zipper, transforming growth factor beta | |
| | | | protein TSC-22 | 1 induced transcript 4, transforming growth | |
| | | | | factor beta-stimulated protein TSC-22 | |
| 63 | 11114 | NM_013046 | thyrotropin releasing | thyrotropin releasing hormone, thyrotropin- | f, General |
| | | | hormone, thyrotropin- | releasing hormone | |
| | | | releasing hormone | | |
| 63 | 11113 | NM_013046 | thyrotropin releasing | | f |
| | | | hormone, thyrotropin- | | |
| | | | releasing hormone | | |
| 64 | 16924 | NM_013069 | | CD74 antigen (invariant polypeptide of major | b |
| | | | | histocompatibility complex, class II antigen- | |
| | | | | associated), la-associated invariant chain, | |
| | | | | KIAA275 gene product, sparc/osteonectin, | |
| | | | | cwcv and kazal-like domains proteoglycan | |
| | | | | (testican), sparc/osteonectin, cwcv and kazal- | |
| | | | | like domains proteoglycan 1, sparc/osteonectin, | |
| | | | | cwcv and kazal-like domains proteoglycan 2 | |
| 64 | 25676 | NM_013069 | | | b |
| 64 | 16925 | NM_013069 | | CD74 antigen (invariant polypeptide of major | b |
| | | | | histocompatibility complex, class II antigen- | |
| | | | | associated), la-associated invariant chain, | |
| | | | | KIAA275 gene product, sparc/osteonectin, | |
| | | | | cwcv and kazal-like domains proteoglycan | |
| | | | | (testican), sparc/osteonectin, cwcv and kazal- | |
| | | | | like domains proteoglycan 1, sparc/osteonectin, | |
| | | | | cwcv and kazal-like domains proteoglycan 2 | |
| 65 | 357 | NM_013086 | | | General |
| 66 | 1521 | NM_013091 | | tumor necrosis factor receptor superfamily, | i |
| | | | | member 12, tumor necrosis factor receptor | |
| | | | | superfamily, member 12 (translocating chain- | |
| | | | | association membrane protein), tumor necrosis | |
| | | | | factor receptor superfamily, member 1A, tumor | |
| | | | | necrosis factor receptor superfamily, member | |
| | | | | 1a, tumor necrosis factor receptor superfamily, | |
| | | | | member 1a-like 1, tumor necrosis factor | |
| | | | | receptor superfamily, member 1a-like 2 | |
| 67 | 1684 | NM_013096 | hemoglobin alpha, adult | EST, Moderately similar to HART1 hemoglobin | a, b |
| | | | chain 2, hemoglobin, | alpha-1 chain - rat [R. norvegicus], ESTs, | |
| | | | alpha 1 | Moderately similar to HART1 hemoglobin alpha- | |
| | | | | 1 chain - rat [R. norvegicus], RIKEN cDNA | |
| | | | | 25142H12 gene, hemoglobin alpha, adult chain | |
| | | | | 1, hemoglobin, alpha 1, hemoglobin, alpha 2 | |
| 67 | 26150 | NM_013096 | | | a, b |
| 67 | 1689 | NM_013096 | hemoglobin alpha, adult | EST, Moderately similar to HART1 hemoglobin | a, b, |
| | | | chain 2, hemoglobin, | alpha-1 chain - rat [R. norvegicus], ESTs, | General |
| | | | alpha 1 | Moderately similar to HART1 hemoglobin alpha- | |
| | | | | 1 chain - rat [R. norvegicus], RIKEN cDNA | |
| | | | | 25142H12 gene, hemoglobin alpha, adult chain | |
| | | | | 1, hemoglobin, alpha 1, hemoglobin, alpha 2 | |
| 67 | 1685 | NM_013096 | hemoglobin alpha, adult | | a |
| | | | chain 2, hemoglobin, | | |
| | | | alpha 1 | | |
| 67 | 1688 | NM_013096 | hemoglobin alpha, adult | | a, b |
| | | | chain 2, hemoglobin, | | |
| | | | alpha 1 | | |
| 68 | 1321 | NM_013098 | | ESTs, Weakly similar to G6PT RAT GLUCOSE- | a |
| | | | | 6-PHOSPHATASE [R. norvegicus], Homo | |
| | | | | sapiens, clone IMAGE: 35476, mRNA, partial | |
| | | | | cds, RIKEN cDNA 711K1 gene, expressed | |
| | | | | sequence AW545836, glucose-6-phosphatase, | |
| | | | | catalytic, glucose-6-phosphatase, catalytic | |
| | | | | (glycogen storage disease type I, von Gierke | |
| | | | | disease), glucose-6-phosphatase, catalytic, | |
| | | | | related sequence, islet-specific glucose-6- | |
| | | | | phosphatase catalytic subunit-related protein | |
| 69 | 19949 | NM_013106 | guanine nucleotide | guanine nucleotide binding protein (G protein), | General |
| | | | binding protein (G | alpha inhibiting activity polypeptide 3, guanine | |
| | | | protein), alpha inhibiting | nucleotide binding protein, alpha inhibiting 3 | |
| | | | activity polypeptide 3, | | |
| | | | guanine nucleotide | | |
| | | | binding protein, alpha | | |
| | | | inhibiting 3 | | |
| 70 | 23709 | NM_013113 | | ATPase, Na+/K+ transporting, beta 1 | g |
| | | | | polypeptide | |
| 71 | 2005 | NM_013127 | | CD38 antigen, CD38 antigen (p45), Homo | c |
| | | | | sapiens cDNA: FLJ22754 fis, clone KAIA615 | |
| 72 | 14299 | NM_013129 | interleukin 15 | interleukin 15 | General |
| 73 | 16982 | NM_013144 | | insulin-like growth factor binding protein 1, | General |
| | | | | protease, serine, 11 (IGF binding) | |
| 74 | 21683 | NM_013154 | CCAAT/enhancer binding | CCAAT/enhancer binding protein (C/EBP), | General |
| | | | protein (C/EBP), delta | delta | |
| 74 | 21682 | NM_013154 | CCAAT/enhancer binding | CCAAT/enhancer binding protein (C/EBP), | General |
| | | | protein (C/EBP), delta | delta | |
| 75 | 24867 | NM_013155 | | EST, Weakly similar to LDVR RAT VERY LOW- | General |
| | | | | DENSITY LIPOPROTEIN RECEPTOR | |
| | | | | PRECURSOR [R. norvegicus], ESTs, Weakly | |
| | | | | similar to LDVR RAT VERY LOW-DENSITY | |
| | | | | LIPOPROTEIN RECEPTOR PRECURSOR | |
| | | | | [R. norvegicus], low density lipoprotein receptor- | |
| | | | | related protein 8, apolipoprotein e receptor, | |
| | | | | very low density lipoprotein receptor | |
| 76 | 25567 | NM_013156 | | | d, General |
| 76 | 3431 | NM_013156 | cathepsin L | ESTs, Weakly similar to CATHEPSIN L | General |
| | | | | PRECURSOR [M. musculus], RIKEN cDNA | |
| | | | | 23151M13 gene, RIKEN cDNA 493486L24 | |
| | | | | gene, cathepsin 7, cathepsin F, cathepsin L, | |
| | | | | cathepsin L2, cathepsin O | |
| 76 | 3430 | NM_013156 | cathepsin L | ESTs, Weakly similar to CATHEPSIN L | d, General |
| | | | | PRECURSOR [M. musculus], RIKEN cDNA | |
| | | | | 23151M13 gene, RIKEN cDNA 493486L24 | |
| | | | | gene, cathepsin 7, cathepsin F, cathepsin L, | |
| | | | | cathepsin L2, cathepsin O | |
| 77 | 1714 | NM_013187 | | Homo sapiens, Similar to cortactin isoform B, | g, i, |
| | | | | clone MGC: 3591 IMAGE: 3637586, mRNA, | General |
| | | | | complete cds, cell differentiation and embryonic | |
| | | | | development, ems1 sequence (mammary | |
| | | | | tumor and squamous cell carcinoma-associated | |
| | | | | (p8/85 src substrate), expressed sequence | |
| | | | | AI89414, phospholipase C, gamma 1 (formerly | |
| | | | | subtype 148) | |
| 78 | 16448 | NM_013197 | | EST, Highly similar to HEM RAT 5- | a, b, |
| | | | | AMINOLEVULINIC ACID SYNTHASE, | General |
| | | | | ERYTHROID-SPECIFIC, MITOCHONDRIAL | |
| | | | | PRECURSOR [R. norvegicus], ESTs, Highly | |
| | | | | similar to SYHUAE 5-aminolevulinate synthase | |
| | | | | [H. sapiens], aminolevulinate, delta-, synthase 2 | |
| | | | | (sideroblastic/hypochromic anemia), | |
| | | | | aminolevulinic acid synthase 1, aminolevulinic | |
| | | | | acid synthase 2, erythroid, glycine C- | |
| | | | | acetyltransferase (2-amino-3-ketobutyrate | |
| | | | | coenzyme A ligase), glycine C- | |
| | | | | acetyltransferase (2-amino-3-ketobutyrate- | |
| | | | | coenzyme A ligase) | |
| 79 | 20826 | NM_013218 | | ESTs, Weakly similar to KAD3_HUMAN | h |
| | | | | GTP: AMP PHOSPHOTRANSFERASE | |
| | | | | MITOCHONDRIAL [H. sapiens], RIKEN cDNA | |
| | | | | 1718L2 gene, adenylate kinase 3 alpha like | |
| 80 | 18313 | NM_013220 | ankyrin-like repeat | ESTs, Highly similar to A44437 regenerating | f, g, i, |
| | | | protein, cardiac ankyrin | liver inhibitory factor RL/IF-1 - rat | General |
| | | | repeat protein | [R. norvegicus], ESTs, Highly similar to A57291 | |
| | | | | cytokine inducible nuclear protein C193 | |
| | | | | [H. sapiens], ESTs, Weakly similar to A57291 | |
| | | | | cytokine inducible nuclear protein C193 | |
| | | | | [H. sapiens], ESTs, Weakly similar to I-kappa B | |
| | | | | alpha chain [M. musculus], RIKEN cDNA | |
| | | | | 11158D9 gene, RIKEN cDNA 169D24 gene, | |
| | | | | RIKEN cDNA 493539L19 gene, ankyrin repeat | |
| | | | | domain 2 (stretch responsive muscle), cardiac | |
| | | | | ankyrin repeat protein, expressed sequence | |
| | | | | AA489, nuclear factor of kappa light chain gene | |
| | | | | enhancer in B-cells inhibitor, alpha, nuclear | |
| | | | | factor of kappa light polypeptide gene enhancer | |
| | | | | in B-cells inhibitor, alpha | |
| 81 | 815 | NM_013224 | | ESTs, Highly similar to RS26_HUMAN 4S | e, General |
| | | | | RIBOSOMAL PROTEIN S26 [H. sapiens], | |
| | | | | Homo sapiens, clone IMAGE: 41953, mRNA, | |
| | | | | Human DNA sequence from PAC 384D21 on | |
| | | | | chromosome X contains ribosomal protein S26 | |
| | | | | pseudogene, STS, polymerase (RNA) II (DNA | |
| | | | | directed) polypeptide D, ribosomal protein S26 | |
| 82 | 15239 | NM_016989 | | EST, Weakly similar to RL15 RAT 6S | h |
| | | | | RIBOSOMAL PROTEIN L15 [R. norvegicus], | |
| | | | | ESTs, Highly similar to RL15_HUMAN 6S | |
| | | | | RIBOSOMAL PROTEIN L15 [H. sapiens], | |
| | | | | ESTs, Moderately similar to RL15 RAT 6S | |
| | | | | RIBOSOMAL PROTEIN L15 [R. norvegicus], | |
| | | | | RIKEN cDNA 2518H7 gene, ribosomal protein | |
| | | | | L15 | |
| 83 | 3202 | NM_017039 | protein phosphatase 2 | | h |
| | | | (formerly 2A), catalytic | | |
| | | | subunit, alpha isoform, | | |
| | | | protein phosphatase 2a, | | |
| | | | catalytic subunit, alpha | | |
| | | | isoform | | |
| 83 | 3203 | NM_017039 | protein phosphatase 2 | protein phosphatase 2 (formerly 2A), catalytic | h |
| | | | (formerly 2A), catalytic | subunit, alpha isoform, protein phosphatase 2a, | |
| | | | subunit, alpha isoform, | catalytic subunit, alpha isoform | |
| | | | protein phosphatase 2a, | | |
| | | | catalytic subunit, alpha | | |
| | | | isoform | | |
| 84 | 24596 | NM_017040 | protein phosphatase 2 | Mus musculus adult female placenta cDNA, | h |
| | | | (formerly 2A), catalytic | RIKEN full-length enriched library, | |
| | | | subunit, beta isoform, | clone: 1617J22, full insert sequence, RIKEN | |
| | | | protein phosphatase 2a, | cDNA 2313C1 gene, expressed sequence | |
| | | | catalytic subunit, beta | AI115466, protein phosphatase 2 (formerly 2A), | |
| | | | isoform | catalytic subunit, beta isoform, protein | |
| | | | | phosphatase 2a, catalytic subunit, beta isoform, | |
| | | | | protein phosphatase 4, catalytic subunit | |
| 85 | 6654 | NM_017068 | lysosomal membrane | CD68 antigen, ESTs, Highly similar to LMP2 | a |
| | | | glycoprotein 2, lysosomal- | RAT LYSOSOME-ASSOCIATED MEMBRANE | |
| | | | associated membrane | GLYCOPROTEIN 2 PRECURSOR | |
| | | | protein 2 | [R. norvegicus], ESTs, Weakly similar to A4842 | |
| | | | | lysosomal membrane glycoprotein lamp-2 | |
| | | | | homolog [H. sapiens], lysosomal membrane | |
| | | | | glycoprotein 2, lysosomal-associated | |
| | | | | membrane protein 2 | |
| 86 | 11152 | NM_017073 | glutamate-ammonia | glutamate-ammonia ligase (glutamine | General |
| | | | ligase (glutamine | synthase), glutamine synthetase | |
| | | | synthase), glutamine | | |
| | | | synthetase | | |
| 86 | 11153 | NM_017073 | glutamate-ammonia | glutamate-ammonia ligase (glutamine | General |
| | | | ligase (glutamine | synthase), glutamine synthetase | |
| | | | synthase), glutamine | | |
| | | | synthetase | | |
| 87 | 22552 | NM_017087 | biglycan | ESTs, Weakly similar to BONE/CARTILAGE | General |
| | | | | PROTEOGLYCAN I PRECURSOR | |
| | | | | [R. norvegicus], ESTs, Weakly similar to | |
| | | | | PGS1_HUMAN BONE/CARTILAGE | |
| | | | | PROTEOGLYCAN I PRECURSOR [H. sapiens], | |
| | | | | asporin, asporin (LRR class 1), biglycan, opticin | |
| 88 | 8888 | NM_017090 | guanylate cyclase 1, | ESTs, Weakly similar to ANPA MOUSE | General |
| | | | soluble, alpha 3 | ATRIAL NATRIURETIC PEPTIDE RECEPTOR | |
| | | | | A PRECURSOR [M. musculus], ESTs, Weakly | |
| | | | | similar to GUANYLATE CYCLASE SOLUBLE, | |
| | | | | ALPHA-1 CHAIN [R. norvegicus], guanylate | |
| | | | | cyclase 1, soluble, alpha 2, guanylate cyclase | |
| | | | | 1, soluble, alpha 3, guanylate cyclase 1, | |
| | | | | soluble, beta 3, natriuretic peptide receptor 1, | |
| | | | | soluble guanylyl cyclase alpha2 subunit | |
| 89 | 1435 | NM_017125 | CD63 antigen (melanoma | CD63 antigen (melanoma 1 antigen), Cd63 | g, General |
| | | | 1 antigen), Cd63 antigen | antigen, DNA segment, Chr 14, ERATO Doi | |
| | | | | 226, expressed, EST, Weakly similar to CD63 | |
| | | | | ANTIGEN [R. norvegicus], EST, Weakly similar | |
| | | | | to I3816 melanoma-associated antigen CD63 | |
| | | | | [H. sapiens], ESTs, Weakly similar to A46493 | |
| | | | | metastasis suppressor KAI1 [H. sapiens], Homo | |
| | | | | sapiens cDNA FLJ221 fis, clone COLF121, | |
| | | | | RIKEN cDNA 131A2 gene, RIKEN cDNA | |
| | | | | 22121G21 gene, transmembrane 4 superfamily | |
| | | | | member 2 | |
| 90 | 21663 | NM_017126 | ferredoxin 1 | ESTs, Moderately similar to AXHU adrenodoxin | General |
| | | | | precursor [H. sapiens], Homo sapiens, Similar | |
| | | | | to RIKEN cDNA B23118G17 gene, clone | |
| | | | | MGC: 1964 IMAGE: 3622817, mRNA, complete | |
| | | | | cds, RIKEN cDNA 136N24 gene, RIKEN cDNA | |
| | | | | B23118G17 gene, ferredoxin 1 | |
| 91 | 24886 | NM_017138 | laminin receptor 1 (67 kD, | EST, Moderately similar to 4S RIBOSOMAL | General |
| | | | ribosomal protein SA) | PROTEIN SA [R. norvegicus], ESTs, Highly | |
| | | | | similar to A31233 ribosomal protein RS.4K, | |
| | | | | cytosolic [H. sapiens], ESTs, Highly similar to | |
| | | | | A5688 laminin receptor, 67 K [H. sapiens], | |
| | | | | ESTs, Moderately similar to A29395 ribosomal | |
| | | | | protein RS.4 K - mouse [M. musculus], ESTs, | |
| | | | | Weakly similar to 14534A protein 4 kD | |
| | | | | [M. musculus], Homo sapiens laminin receptor- | |
| | | | | like protein LAMRL5 mRNA, complete cds, | |
| | | | | laminin receptor 1 (67 kD, ribosomal protein SA) | |
| 92 | 24106 | NM_017141 | DNA polymerase beta, | EST, Weakly similar to A27112 DNA-directed | c |
| | | | polymerase (DNA | DNA polymerase [R. norvegicus], Mus | |
| | | | directed), beta | musculus, Similar to DNA polymerase beta, | |
| | | | | clone MGC: 6386 IMAGE: 3581916, mRNA, | |
| | | | | complete cds, polymerase (DNA directed), | |
| | | | | beta, polymerase (DNA directed), lambda | |
| 92 | 24107 | NM_017141 | DNA polymerase beta, | EST, Weakly similar to A27112 DNA-directed | General |
| | | | polymerase (DNA | DNA polymerase [R. norvegicus], Mus | |
| | | | directed), beta | musculus, Similar to DNA polymerase beta, | |
| | | | | clone MGC: 6386 IMAGE: 3581916, mRNA, | |
| | | | | complete cds, polymerase (DNA directed), | |
| | | | | beta, polymerase (DNA directed), lambda | |
| 93 | 20859 | NM_017144 | troponin I, cardiac | EST, Moderately similar to TROPONIN I, | a, b, f |
| | | | | CARDIAC MUSCLE [R. norvegicus], troponin I, | |
| | | | | cardiac, troponin I, skeletal, slow 1 | |
| 94 | 15365 | NM_017147 | cofilin 1 (non-muscle), | EST, Moderately similar to COF1_HUMAN | g, h, |
| | | | cofilin 1, non-muscle | COFILIN, NON-MUSCLE ISOFOR [H. sapiens], | General |
| | | | | ESTs, Highly similar to DEST_HUMAN | |
| | | | | DESTRIN [H. sapiens], ESTs, Moderately | |
| | | | | similar to COF1 RAT COFILIN, NON-MUSCLE | |
| | | | | ISOFORM [R. norvegicus], ESTs, Moderately | |
| | | | | similar to COF1_HUMAN COFILIN, NON- | |
| | | | | MUSCLE ISOFOR [H. sapiens], cofilin 1 (non- | |
| | | | | muscle), cofilin 1, non-muscle, cofilin 2 | |
| | | | | (muscle), cofilin 2, muscle, destrin | |
| 95 | 5351 | NM_017150 | ribosomal protein L29 | EST, Moderately similar to 6S RIBOSOMAL | General |
| | | | | PROTEIN L29 [R. norvegicus], EST, Weakly | |
| | | | | similar to S65784 ribosomal protein L29, | |
| | | | | cytosolic [H. sapiens], ESTs, Highly similar to | |
| | | | | S65784 ribosomal protein L29, cytosolic | |
| | | | | [H. sapiens], ESTs, Weakly similar to 6S | |
| | | | | RIBOSOMAL PROTEIN L29 [M. musculus], | |
| | | | | Human DNA sequence from clone RP4-595K12 | |
| | | | | on chromosome 1p31.2-31.3 Contains a | |
| | | | | pseudogene similar to 6S RPL29 (ribosomal | |
| | | | | protein L29 (cell surface heparin binding protein | |
| | | | | HIP)), a chromosome 1 specific mRNA | |
| | | | | (KIAA499), a novel mRNA (KIAA433), ESTs, | |
| | | | | STSs, GSSs and a CpG Island, ribosomal | |
| | | | | protein L29 | |
| 96 | 16953 | NM_017151 | ribosomal protein S15 | EST, Moderately similar to R3HU15 ribosomal | e, h |
| | | | | protein S15, cytosolic [H. sapiens], EST, | |
| | | | | Weakly similar to 4S RIBOSOMAL PROTEIN | |
| | | | | S15 [R. norvegicus], ESTs, Highly similar to | |
| | | | | R3HU15 ribosomal protein S15, cytosolic | |
| | | | | [H. sapiens], Homo sapiens, clone | |
| | | | | IMAGE: 44798, mRNA, partial cds, ribosomal | |
| | | | | protein S15 | |
| 97 | 21975 | NM_017154 | xanthene dehydrogenase, | EST, Weakly similar to XDH RAT XANTHINE | General |
| | | | xanthine dehydrogenase | DEHYDROGENASE/OXIDASE [R. norvegicus], | |
| | | | | RIKEN cDNA 1211D3 gene, RIKEN cDNA | |
| | | | | 2313G12 gene, aldehyde oxidase (female | |
| | | | | form), aldehyde oxidase 1, xanthene | |
| | | | | dehydrogenase, xanthine dehydrogenase | |
| 98 | 17104 | NM_017160 | ribosomal protein S6 | EST, Moderately similar to R3HU6 ribosomal | General |
| | | | | protein S6, cytosolic [H. sapiens], EST, Weakly | |
| | | | | similar to 4S RIBOSOMAL PROTEIN S6 | |
| | | | | [R. norvegicus], ESTs, Moderately similar to 4S | |
| | | | | RIBOSOMAL PROTEIN S6 [M. musculus], | |
| | | | | Homo sapiens cDNA: FLJ23534 fis, clone | |
| | | | | LNG6974, highly similar to HUMRPS6A Human | |
| | | | | ribosomal protein S6 mRNA, RIKEN cDNA | |
| | | | | 58345M2 gene, ribosomal protein S6 | |
| 98 | 17107 | NM_017160 | ribosomal protein S6 | EST, Moderately similar to R3HU6 ribosomal | General |
| | | | | protein S6, cytosolic [H. sapiens], EST, Weakly | |
| | | | | similar to 4S RIBOSOMAL PROTEIN S6 | |
| | | | | [R. norvegicus], ESTs, Moderately similar to 4S | |
| | | | | RIBOSOMAL PROTEIN S6 [M. musculus], | |
| | | | | Homo sapiens cDNA: FLJ23534 fis, clone | |
| | | | | LNG6974, highly similar to HUMRPS6A Human | |
| | | | | ribosomal protein S6 mRNA, RIKEN cDNA | |
| | | | | 58345M2 gene, ribosomal protein S6 | |
| 99 | 19031 | NM_017180 | T-cell death associated | ESTs, Weakly similar to S58222 PQ-rich | General |
| | | | gene, pleckstrin | protein [H. sapiens], MARCKS-like protein, Mus | |
| | | | homology-like domain, | musculus 8 days embryo cDNA, RIKEN full- | |
| | | | family A, member 1 | length enriched library, clone: 573519L1, full | |
| | | | | insert sequence, Myristoylated alanine-rich | |
| | | | | protein kinase C substrate, myristoylated | |
| | | | | alanine rich protein kinase C substrate, | |
| | | | | myristoylated alanine-rich protein kinase C | |
| | | | | substrate (MARCKS, 8K-L), pleckstrin | |
| | | | | homology-like domain, family A, member 1, | |
| | | | | pleckstrin homology-like domain, family A, | |
| | | | | member 3, tumor suppressing subtransferable | |
| | | | | candidate 3 | |
| 100 | 15434 | NM_017187 | | EST, Moderately similar to HMG2 RAT HIGH | f |
| | | | | MOBILITY GROUP PROTEIN HMG2 | |
| | | | | [R. norvegicus], EST, Weakly similar to HMG2 | |
| | | | | RAT HIGH MOBILITY GROUP PROTEIN | |
| | | | | HMG2 [R. norvegicus], ESTs, Weakly similar to | |
| | | | | 21363A high mobility group protein 2 | |
| | | | | [H. sapiens], ESTs, Weakly similar to HMG2 | |
| | | | | RAT HIGH MOBILITY GROUP PROTEIN | |
| | | | | HMG2 [R. norvegicus], Human DNA sequence | |
| | | | | from clone RP3-527B1 on | |
| | | | | chromosome 6q25.1-25.3 | |
| | | | | Contains a pseudogene similar to HMG | |
| | | | | (high mobility group) protein, STSs and GSSs, | |
| | | | | Human DNA sequence from clone RP5-17G16 | |
| | | | | on chromosome 1p34.2-35.3. Contains part of | |
| | | | | the gene for a novel CUB and Sushi (SCR | |
| | | | | repeat) domain protein, a novel high-mobility | |
| | | | | group (nonhistone chromosomal) protein 2 | |
| | | | | (HMG2) like protein (pseudo) gene, a heat | |
| | | | | shock 6 kD protein 1 (chaperonin) (HSPD1) | |
| | | | | pseudogene, ESTs, STSs and GSSs, RIKEN | |
| | | | | cDNA 26121J1 gene, expressed sequence | |
| | | | | AI326135, expressed sequence C8539, high | |
| | | | | mobility group box 2, high-mobility group | |
| | | | | (nonhistone chromosomal) protein 2 | |
| 101 | 14696 | NM_017202 | | | e |
| 102 | 5005 | NM_017209 | | Alcohol dehydrogenase 3, CGI-63 protein, | General |
| | | | | ESTs, Weakly similar to QOR MOUSE | |
| | | | | QUINONE OXIDOREDUCTASE [M. musculus], | |
| | | | | Homo sapiens, clone MGC: 183 | |
| | | | | IMAGE: 3897118, mRNA, complete cds, | |
| | | | | KIAA1576 protein, RIKEN cDNA 22147J23 | |
| | | | | gene, alcohol dehydrogenase 1, complex, | |
| | | | | alcohol dehydrogenase 1C (class I), gamma | |
| | | | | polypeptide, crystallin, zeta, expressed | |
| | | | | sequence AI194826, membrane protein of | |
| | | | | cholinergic synaptic vesicles | |
| 103 | 20193 | NM_017232 | prostaglandin- | prostaglandin-endoperoxide synthase 2, | General |
| | | | endoperoxide synthase 2, | prostaglandin-endoperoxide synthase 2 | |
| | | | prostaglandin- | (prostaglandin G/H synthase and | |
| | | | endoperoxide synthase 2 | cyclooxygenase) | |
| | | | (prostaglandin G/H | | |
| | | | synthase and | | |
| | | | cyclooxygenase) | | |
| 104 | 20482 | NM_017240 | myosin heavy chain, | EST, Highly similar to MYOSIN HEAVY CHAIN, | e |
| | | | cardiac muscle, adult, | CARDIAC MUSCLE BETA ISOFORM | |
| | | | myosin heavy chain, | [R. norvegicus], EST, Moderately similar to | |
| | | | cardiac muscle, fetal, | MYOSIN HEAVY CHAIN, CARDIAC MUSCLE | |
| | | | myosin, heavy | BETA ISOFORM [R. norvegicus], ESTs, Highly | |
| | | | polypeptide 6, cardiac | similar to MYOSIN HEAVY CHAIN, CARDIAC | |
| | | | muscle, alpha | MUSCLE BETA ISOFORM [R. norvegicus], | |
| | | | (cardiomyopathy, | ESTs, Highly similar to MYSA MOUSE | |
| | | | hypertrophic 1), myosin, | MYOSIN HEAVY CHAIN, CARDIAC MUSCLE | |
| | | | heavy polypeptide 7, | ALPHA ISOFORM [M. musculus], KIAA1512 | |
| | | | cardiac muscle, beta | protein, myosin heavy chain, cardiac muscle, | |
| | | | | adult, myosin heavy chain, cardiac muscle, | |
| | | | | fetal, myosin, heavy polypeptide 2, skeletal | |
| | | | | muscle, adult, myosin, heavy polypeptide 7, | |
| | | | | cardiac muscle, beta, tuftelin 1 | |
| 104 | 3780 | NM_017240 | | | e |
| 104 | 20484 | NM_017240 | myosin heavy chain, | EST, Highly similar to MYOSIN HEAVY CHAIN, | a, c, e, f |
| | | | cardiac muscle, adult, | CARDIAC MUSCLE BETA ISOFORM | |
| | | | myosin heavy chain, | [R. norvegicus], EST, Moderately similar to | |
| | | | cardiac muscle, fetal, | MYOSIN HEAVY CHAIN, CARDIAC MUSCLE | |
| | | | myosin, heavy | BETA ISOFORM [R. norvegicus], ESTs, Highly | |
| | | | polypeptide 6, cardiac | similar to MYOSIN HEAVY CHAIN, CARDIAC | |
| | | | muscle, alpha | MUSCLE BETA ISOFORM [R. norvegicus], | |
| | | | (cardiomyopathy, | ESTs, Highly similar to MYSA MOUSE | |
| | | | hypertrophic 1), myosin, | MYOSIN HEAVY CHAIN, CARDIAC MUSCLE | |
| | | | heavy polypeptide 7, | ALPHA ISOFORM [M. musculus], KIAA1512 | |
| | | | cardiac muscle, beta | protein, myosin heavy chain, cardiac muscle, | |
| | | | | adult, myosin heavy chain, cardiac muscle, | |
| | | | | fetal, myosin, heavy polypeptide 2, skeletal | |
| | | | | muscle, adult, myosin, heavy polypeptide 7, | |
| | | | | cardiac muscle, beta, tuftelin 1 | |
| 105 | 17563 | NM_017245 | eukaryotic translation | EST, Weakly similar to EFHU2 translation | g, General |
| | | | elongation factor 2 | elongation factor eEF-2 [H. sapiens], ESTs, | |
| | | | | Highly similar to ELONGATION FACTOR 2 | |
| | | | | [R. norvegicus], ESTs, Weakly similar to | |
| | | | | ELONGATION FACTOR 2 [R. norvegicus], G1 | |
| | | | | to phase transition 1, G1 to phase transition 2, | |
| | | | | RIKEN cDNA 493594C11 gene, U5 snRNP- | |
| | | | | specific protein, 116 kD, eukaryotic translation | |
| | | | | elongation factor 1 alpha 1, eukaryotic | |
| | | | | translation elongation factor 2, expressed | |
| | | | | sequence AI45134, hypothetical protein | |
| | | | | FLJ21661 | |
| 106 | 15301 | NM_017259 | B-cell translocation gene | B-cell translocation gene 2, anti-proliferative, B- | General |
| | | | 2, anti-proliferative, BTG | cell translocation gene 3, B-cell translocation | |
| | | | family, member 2 | gene 4, BTG family, member 2, BTG family, | |
| | | | | member 3, BTG family, member 4, ESTs, | |
| | | | | Highly similar to BTG2_HUMAN BTG2 | |
| | | | | PROTEIN PRECURSOR [H. sapiens] | |
| 106 | 15299 | NM_017259 | B-cell translocation gene | B-cell translocation gene 2, anti-proliferative, B- | General |
| | | | 2, anti-proliferative, BTG | cell translocation gene 3, B-cell translocation | |
| | | | family, member 2 | gene 4, BTG family, member 2, BTG family, | |
| | | | | member 3, BTG family, member 4, ESTs, | |
| | | | | Highly similar to BTG2_HUMAN BTG2 | |
| | | | | PROTEIN PRECURSOR [H. sapiens] | |
| 106 | 15300 | NM_017259 | B-cell translocation gene | B-cell translocation gene 2, anti-proliferative, B- | General |
| | | | 2, anti-proliferative, BTG | cell translocation gene 3, B-cell translocation | |
| | | | family, member 2 | gene 4, BTG family, member 2, BTG family, | |
| | | | | member 3, BTG family, member 4, ESTs, | |
| | | | | Highly similar to BTG2_HUMAN BTG2 | |
| | | | | PROTEIN PRECURSOR [H. sapiens] | |
| 107 | 3254 | NM_017282 | proteasome (prosome, | expressed sequence AA4947, proteasome | h |
| | | | macropain) subunit, alpha | (prosome, macropain) subunit, alpha type 5, | |
| | | | type 5, proteasome | proteasome (prosome, macropain) subunit, | |
| | | | (prosome, macropain) | alpha type, 5 | |
| | | | subunit, alpha type, 5 | | |
| 108 | 82 | NM_017297 | potassium inwardly- | potassium inwardly-rectifying channel, | i |
| | | | rectifying channel, | subfamily J, member 5 | |
| | | | subfamily J, member 5 | | |
| 109 | 1894 | NM_017320 | | cathepsin S | General |
| 110 | 356 | NM_017334 | | | General |
| 110 | 355 | NM_017334 | | | General |
| 111 | 20848 | NM_017343 | | ESTs, Weakly similar to MOHULP myosin | c, g |
| | | | | regulatory light chain, placental [H. sapiens], | |
| | | | | RIKEN cDNA 2973G15 gene, expressed | |
| | | | | sequence C77744, myosin, light polypeptide, | |
| | | | | regulatory, non-sarcomeric (2 kD) | |
| 112 | 460 | NM_019131 | tropomyosin 1 (alpha), | ESTs, Moderately similar to alpha-tropomyosin | a |
| | | | tropomyosin 1, alpha | slow [M. musculus], tropomyosin 4 | |
| 113 | 5622 | NM_019143 | fibronectin 1 | | General |
| 114 | 17066 | NM_019170 | | ESTs, Weakly similar to JC5284 carbonyl | e |
| | | | | reductase (NADPH) (EC 1.1.1.184), inducible - | |
| | | | | rat [R. norvegicus], Homo sapiens, clone | |
| | | | | MGC: 2328 IMAGE: 463754, mRNA, complete | |
| | | | | cds, RIKEN cDNA 1111J5 gene, RIKEN cDNA | |
| | | | | 94359D4 gene, carbonyl reductase 1, carbonyl | |
| | | | | reductase 3, expressed sequence C81353 | |
| 115 | 1174 | NM_019184 | | RIKEN cDNA 2131M18 gene, RIKEN cDNA | b |
| | | | | 21318C6 gene, RIKEN cDNA 2219K14 gene, | |
| | | | | cytochrome P45, 2c29, cytochrome P45, | |
| | | | | subfamily IIC (mephenytoin 4-hydroxylase), | |
| | | | | polypeptide 18 | |
| 116 | 18569 | NM_019212 | actin, alpha 1, skeletal | BAF53, BRG1/brm-associated factor 53A, EST, | General |
| | | | muscle | Weakly similar to ACTIN, ALPHA SKELETAL | |
| | | | | MUSCLE [R. norvegicus], ESTs, Weakly similar | |
| | | | | to ATHU actin alpha 1, skeletal muscle | |
| | | | | [H. sapiens], Homo sapiens FKSG73 (FKSG73) | |
| | | | | mRNA, complete cds, RIKEN cDNA 6141G9 | |
| | | | | gene, actin, alpha 1, skeletal muscle, actin-like | |
| | | | | 6, actin-related protein 3 | |
| 117 | 20433 | NM_019232 | serum/glucocorticoid | 3-phosphoinositide dependent protein kinase-1, | b, General |
| | | | regulated kinase | EST, Weakly similar to SGK RAT | |
| | | | | SERINE/THREONINE-PROTEIN KINASE SGK | |
| | | | | [R. norvegicus], Mus musculus serine/threonine | |
| | | | | protein kinase CISK (Cisk) mRNA, complete | |
| | | | | cds, RIKEN cDNA 1196F7 gene, | |
| | | | | serum/glucocorticoid regulated kinase, | |
| | | | | serum/glucocorticoid regulated kinase 2, | |
| | | | | serum/glucocorticoid regulated kinase-like, | |
| | | | | thymoma viral proto-oncogene 3 | |
| 118 | 17908 | NM_019242 | interferon-related | ESTs, Weakly similar to INTERFERON- | c |
| | | | developmental regulator 1 | RELATED PROTEIN PC4 [R. norvegicus], | |
| | | | | interferon-related developmental regulator 1, | |
| | | | | interferon-related developmental regulator 2 | |
| 119 | 11218 | NM_019247 | paired-like homeodomain | paired-like homeodomain transcription factor 1, | General |
| | | | transcription factor 3 | paired-like homeodomain transcription factor 2, | |
| | | | | paired-like homeodomain transcription factor 3 | |
| 120 | 23419 | NM_019257 | splicing factor, | EST, Weakly similar to SPLICING FACTOR, | d |
| | | | arginine/serine-rich 5, | ARGININE/SERINE-RICH 5 [R. norvegicus], | |
| | | | splicing factor, | RIKEN cDNA 1211E11 gene, splicing factor, | |
| | | | arginine/serine-rich 5 | arginine/serine-rich 4, splicing factor, | |
| | | | (SRp4, HRS) | arginine/serine-rich 4 (SRp75), splicing factor, | |
| | | | | arginine/serine-rich 5, splicing factor, | |
| | | | | arginine/serine-rich 5 (SRp4, HRS), splicing | |
| | | | | factor, arginine/serine-rich 6 | |
| 121 | 21443 | NM_019262 | complement component | C1q-related factor, Homo sapiens, Similar to | General |
| | | | 1, q subcomponent, beta | complement component 1, q subcomponent, c | |
| | | | polypeptide | polypeptide, clone MGC: 17279 | |
| | | | | IMAGE: 4212772, mRNA, complete cds, | |
| | | | | complement component 1, q subcomponent, | |
| | | | | beta polypeptide, complement component 1, q | |
| | | | | subcomponent, c polypeptide, expressed | |
| | | | | sequence AI385742 | |
| 122 | 20735 | NM_019283 | solute carrier family 3 | EST, Moderately similar to SAHU4F cell | a, d, |
| | | | (activators of dibasic and | surface antigen 4F2 heavy chain [H. sapiens], | General |
| | | | neutral amino acid | ESTs, Moderately similar to 191425A AA | |
| | | | transport), member 2 | transporter [H. sapiens], ESTs, Moderately | |
| | | | | similar to SAHU4F cell surface antigen 4F2 | |
| | | | | heavy chain [H. sapiens], putative L-type neutral | |
| | | | | amino acid transporter, solute carrier family 3 | |
| | | | | (activators of dibasic and neutral amino acid | |
| | | | | transport), member 2, solute carrier family 3 | |
| | | | | (cystine, dibasic and neutral amino acid | |
| | | | | transporters, activator of cystine, dibasic and | |
| | | | | neutral amino acid transport), member 1, solute | |
| | | | | carrier family 3, member 1 | |
| 122 | 20734 | NM_019283 | solute carrier family 3 | EST, Moderately similar to SAHU4F cell | d |
| | | | (activators of dibasic and | surface antigen 4F2 heavy chain [H. sapiens], | |
| | | | neutral amino acid | ESTs, Moderately similar to 191425A AA | |
| | | | transport), member 2 | transporter [H. sapiens], ESTs, Moderately | |
| | | | | similar to SAHU4F cell surface antigen 4F2 | |
| | | | | heavy chain [H. sapiens], putative L-type neutral | |
| | | | | amino acid transporter, solute carrier family 3 | |
| | | | | (activators of dibasic and neutral amino acid | |
| | | | | transport), member 2, solute carrier family 3 | |
| | | | | (cystine, dibasic and neutral amino acid | |
| | | | | transporters, activator of cystine, dibasic and | |
| | | | | neutral amino acid transport), member 1, solute | |
| | | | | carrier family 3, member 1 | |
| 123 | 10016 | NM_019289 | | EST, Highly similar to AR41_HUMAN ARP2/3 | i |
| | | | | COMPLEX 41 KDA SUBUNIT [H. sapiens], | |
| | | | | ESTs, Moderately similar to AR41_HUMAN | |
| | | | | ARP2/3 COMPLEX 41 KDA SUBUNIT | |
| | | | | [H. sapiens], actin related protein 2/3 complex, | |
| | | | | subunit 1A (41 kD), actin related protein 2/3 | |
| | | | | complex, subunit 1A (41 kDa), actin related | |
| | | | | protein 2/3 complex, subunit 1B (41 kDa), | |
| | | | | expressed sequence AA4864, suppressor of | |
| | | | | profilin/p41 of actin-related complex 2/3 | |
| 124 | 15056 | NM_019291 | | EST, Moderately similar to CARBONIC | General |
| | | | | ANHYDRASE II [R. norvegicus], EST, Weakly | |
| | | | | similar to CARBONIC ANHYDRASE II | |
| | | | | [M. musculus], carbonic anhydrase 2, carbonic | |
| | | | | anhydrase 7, carbonic anhydrase I, carbonic | |
| | | | | anhydrase II | |
| 125 | 20750 | NM_019301 | | CUB and Sushi multiple domains 1, ESTs, | h |
| | | | | Highly similar to I7312 complement C3b/C4b | |
| | | | | receptor, membrane-bound form precursor | |
| | | | | [H. sapiens], ESTs, Weakly similar to JC254 | |
| | | | | complement regulatory protein, 5I2 antigen | |
| | | | | precursor - rat [R. norvegicus], Mus musculus 8 | |
| | | | | days embryo cDNA, RIKEN full-length enriched | |
| | | | | library, clone: 573478H2, full insert sequence, | |
| | | | | complement component (3b/4b) receptor 1, | |
| | | | | including Knops blood group system, | |
| | | | | complement receptor related protein, decay | |
| | | | | accelerating factor 1, decay accelerating factor | |
| | | | | 2, membrane cofactor protein | |
| 126 | 52 | NM_019335 | | NIMA (never in mitosis gene a)-related | e |
| | | | | expressed kinase 4, RIKEN cDNA 261528K9 | |
| | | | | gene, eukaryotic translation initiation factor 2 | |
| | | | | alpha kinase 2, eukaryotic translation initiation | |
| | | | | factor 2-alpha kinase 3, protein kinase, | |
| | | | | interferon-inducible double stranded RNA | |
| | | | | dependent, serine/threonine kinase 31 | |
| 127 | 22675 | NM_019358 | | glycoprotein 38, lung type-I cell membrane- | General |
| | | | | associated glycoprotein | |
| 128 | 20057 | NM_019370 | | EST, Weakly similar to A578 cell surface | g |
| | | | | antigen RB13-6 - rat [R. norvegicus], ESTs, | |
| | | | | Weakly similar to A55144 autotaxin precursor | |
| | | | | [H. sapiens], ESTs, Weakly similar to A578 cell | |
| | | | | surface antigen RB13-6 - rat [R. norvegicus], | |
| | | | | Mus musculus, Similar to alkaline | |
| | | | | phosphodiesterase, clone MGC: 6548 | |
| | | | | IMAGE: 2655671, mRNA, complete cds, | |
| | | | | ectonucleotide | |
| | | | | pyrophosphatase/phosphodiesterase 1, | |
| | | | | ectonucleotide | |
| | | | | pyrophosphatase/phosphodiesterase 2, | |
| | | | | ectonucleotide | |
| | | | | pyrophosphatase/phosphodiesterase 3, | |
| | | | | ectonucleotide | |
| | | | | pyrophosphatase/phosphodiesterase 4 | |
| | | | | (putative function), ectonucleotide | |
| | | | | pyrophosphatase/phosphodiesterase 5 | |
| | | | | (putative function), expressed sequence | |
| | | | | AI876438 | |
| 129 | 1324 | NM_019371 | | EGL nine (C. elegans) homolog 1, EGL nine | General |
| | | | | (C. elegans) homolog 2, EGL nine (C. elegans) | |
| | | | | homolog 3, EGL nine homolog 3 (C. elegans), | |
| | | | | ESTs, Moderately similar to A5377 growth | |
| | | | | factor-responsive protein, vascular smooth | |
| | | | | muscle - rat [R. norvegicus], ESTs, Weakly | |
| | | | | similar to A5377 growth factor-responsive | |
| | | | | protein, vascular smooth muscle - rat | |
| | | | | [R. norvegicus], SCAN domain-containing 2 | |
| 130 | 22727 | NM_019383 | | ATP synthase, H+ transporting, mitochondrial F | i |
| | | | | complex, subunit d, EST, Weakly similar to | |
| | | | | ATP SYNTHASE D CHAIN, MITOCHONDRIAL | |
| | | | | [R. norvegicus], EST, Weakly similar to | |
| | | | | ATPQ_HUMAN ATP SYNTHASE D CHAIN, | |
| | | | | MITOCHONDRIAL [H. sapiens], Homo sapiens | |
| | | | | clone 23e8 My32 protein mRNA, complete cds, | |
| | | | | RIKEN cDNA 619D1 gene | |
| 131 | 16 | NM_019386 | | EST, Weakly similar to TGLC MOUSE | General |
| | | | | PROTEIN-GLUTAMINE GAMMA- | |
| | | | | GLUTAMYLTRANSFERASE [M. musculus], | |
| | | | | Homo sapiens mRNA; cDNA DKFZp667H46 | |
| | | | | (from clone DKFZp667H46), Tissue | |
| | | | | transglutaminase homologue {alternatively | |
| | | | | spliced} [human, erythroleukemia cell line HEL | |
| | | | | GM6141A, mRNA, 2362 nt], transglutaminase 2 | |
| | | | | (C polypeptide, protein-glutamine-gamma- | |
| | | | | glutamyltransferase), transglutaminase 2, C | |
| | | | | polypeptide, transglutaminase 5 | |
| 131 | 17 | NM_019386 | | EST, Weakly similar to TGLC MOUSE | General |
| | | | | PROTEIN-GLUTAMINE GAMMA- | |
| | | | | GLUTAMYLTRANSFERASE [M. musculus], | |
| | | | | Homo sapiens mRNA; cDNA DKFZp667H46 | |
| | | | | (from clone DKFZp667H46), Tissue | |
| | | | | transglutaminase homologue {alternatively | |
| | | | | spliced} [human, erythroleukemia cell line HEL | |
| | | | | GM6141A, mRNA, 2362 nt], transglutaminase 2 | |
| | | | | (C polypeptide, protein-glutamine-gamma- | |
| | | | | glutamyltransferase), transglutaminase 2, C | |
| | | | | polypeptide, transglutaminase 5 | |
| 132 | 574 | NM_019905 | hydroxyacid oxidase | ESTs, Highly similar to (S)-2-HYDROXY-ACID | g, i, |
| | | | (glycolate oxidase) 3, | OXIDASE, PEROXISOMAL [R. norvegicus], | General |
| | | | hydroxyacid oxidase 3 | ESTs, Highly similar to LUHU36 annexin II | |
| | | | (medium-chain) | [H. sapiens], RIKEN cDNA 1113P15 gene, | |
| | | | | RIKEN cDNA B43311C9 gene, annexin A2, | |
| | | | | annexin A2 pseudogene 2, caspase recruitment | |
| | | | | domain family, member 6, expressed sequence | |
| | | | | AW215814, hydroxyacid oxidase (glycolate | |
| | | | | oxidase) 3, hydroxyacid oxidase 1, liver, | |
| | | | | hydroxyacid oxidase 2 (long chain), nucleolar | |
| | | | | protein 3 (apoptosis repressor with CARD | |
| | | | | domain) | |
| 133 | 18713 | NM_020075 | eukaryotic translation | DNA segment, Chr 12, ERATO Doi 549, | General |
| | | | initiation factor 5 | expressed, KIAA1856 protein, eukaryotic | |
| | | | | translation initiation factor 5 | |
| 133 | 18715 | NM_020075 | eukaryotic translation | DNA segment, Chr 12, ERATO Doi 549, | General |
| | | | initiation factor 5 | expressed, KIAA1856 protein, eukaryotic | |
| | | | | translation initiation factor 5 | |
| 134 | 19696 | NM_021699 | | ELKL motif kinase, ESTs, Weakly similar to | General |
| | | | | G125 serine/threonine protein kinase | |
| | | | | [H. sapiens], ESTs, Weakly similar to | |
| | | | | SN1L_RAT PROBABLE SERINE/THREONINE | |
| | | | | PROTEIN KINASE SNF1LK (SALT- | |
| | | | | INDUCIBLE PROTEIN KINASE) (PROTEIN | |
| | | | | KINASE KID2) [R. norvegicus], Homo sapiens | |
| | | | | mRNA; cDNA DKFZp434P81 (from clone | |
| | | | | DKFZp434P81), MAP/microtubule affinity- | |
| | | | | regulating kinase 1, MAP/microtubule affinity- | |
| | | | | regulating kinase 3, RIKEN cDNA 2419P21 | |
| | | | | gene, RIKEN cDNA 573525O22 gene, SNF1- | |
| | | | | like kinase, expressed sequence AW49115, | |
| | | | | salt-inducible protein kinase | |
| 135 | 19710 | NM_021744 | | CD14 antigen, ESTs, Weakly similar to CD14 | i, General |
| | | | | RAT MONOCYTE DIFFERENTIATION | |
| | | | | ANTIGEN CD14 PRECURSOR [R. norvegicus] | |
| 136 | 20035 | NM_021754 | | DKFZP566J153 protein, ESTs, Moderately | General |
| | | | | similar to T17299 hypothetical protein | |
| | | | | DKFZp564H2171.1 [H. sapiens], nucleolar | |
| | | | | protein NOP5/NOP58 | |
| 137 | 14397 | NM_021909 | FXYD domain-containing | EST, Weakly similar to A43932 mucin 2 | g, General |
| | | | ion transport regulator 5 | precursor, intestinal [H. sapiens], ESTs, Weakly | |
| | | | | similar to A43932 mucin 2 precursor, intestinal | |
| | | | | [H. sapiens], FXYD domain-containing ion | |
| | | | | transport regulator 5, Homo sapiens cDNA | |
| | | | | FLJ12566 fis, clone NT2RM4852 | |
| 138 | 17100 | NM_022179 | | EST, Moderately similar to HXK3_HUMAN | h, General |
| | | | | HEXOKINASE TYPE III [H. sapiens], EST, | |
| | | | | Weakly similar to HXK2 MOUSE | |
| | | | | HEXOKINASE TYPE II [M. musculus], ESTs, | |
| | | | | Moderately similar to HXK2 MOUSE | |
| | | | | HEXOKINASE TYPE II [M. musculus], ESTs, | |
| | | | | Weakly similar to HXK2 MOUSE | |
| | | | | HEXOKINASE TYPE II [M. musculus], | |
| | | | | hexokinase 2, hexokinase 3 (white cell) | |
| 138 | 17101 | NM_022179 | | EST, Moderately similar to HXK3_HUMAN | General |
| | | | | HEXOKINASE TYPE III [H. sapiens], EST, | |
| | | | | Weakly similar to HXK2 MOUSE | |
| | | | | HEXOKINASE TYPE II [M. musculus], ESTs, | |
| | | | | Moderately similar to HXK2 MOUSE | |
| | | | | HEXOKINASE TYPE II [M. musculus], ESTs, | |
| | | | | Weakly similar to HXK2 MOUSE | |
| | | | | HEXOKINASE TYPE II [M. musculus], | |
| | | | | hexokinase 2, hexokinase 3 (white cell) | |
| 139 | 20204 | NM_022196 | | leukemia inhibitory factor, leukemia inhibitory | i, General |
| | | | | factor (cholinergic differentiation factor) | |
| 140 | 20385 | NM_022229 | | EST, Moderately similar to CH6 MOUSE 6 KDA | h |
| | | | | HEAT SHOCK PROTEIN, MITOCHONDRIAL | |
| | | | | PRECURSOR [M. musculus], EST, Moderately | |
| | | | | similar to CH6_HUMAN 6 KDA HEAT SHOCK | |
| | | | | PROTEIN, MITOCHONDRIAL PRECURSOR | |
| | | | | [H. sapiens], ESTs, Highly similar to I5342 | |
| | | | | chaperonin [H. sapiens], ESTs, Weakly similar | |
| | | | | to I5342 chaperonin [H. sapiens], Homo | |
| | | | | sapiens, clone IMAGE: 4155316, mRNA, partial | |
| | | | | cds, heat shock 6 kD protein 1 (chaperonin), | |
| | | | | heat shock protein, 6 kDa | |
| 141 | 6263 | NM_022251 | | EST, Weakly similar to AMPN RAT | b |
| | | | | AMINOPEPTIDASE N [R. norvegicus], Leucine | |
| | | | | arylaminopeptidase 1, alanyl (membrane) | |
| | | | | aminopeptidase, alanyl (membrane) | |
| | | | | aminopeptidase (aminopeptidase N, | |
| | | | | aminopeptidase M, microsomal | |
| | | | | aminopeptidase, CD13, p15), aminopeptidase, | |
| | | | | glutamyl aminopeptidase, glutamyl | |
| | | | | aminopeptidase (aminopeptidase A), type 1 | |
| | | | | tumor necrosis factor receptor shedding | |
| | | | | aminopeptidase regulator | |
| 142 | 6585 | NM_022266 | | WNT1 inducible signaling pathway protein 1, | i, General |
| | | | | WNT1 inducible signaling pathway protein 2, | |
| | | | | WNT1 inducible signaling pathway protein 3, | |
| | | | | connective tissue growth factor | |
| 143 | 17161 | NM_022298 | | ESTs, Highly similar to A2335 tubulin alpha | g, General |
| | | | | chain [H. sapiens], tubulin alpha 1, tubulin alpha | |
| | | | | 2, tubulin alpha 3, tubulin alpha 6, tubulin, alpha | |
| | | | | 2, tubulin, alpha 3, tubulin, alpha, ubiquitous | |
| 144 | 13480 | NM_022390 | | RIKEN cDNA 2618L4 gene, quinoid | f |
| | | | | dihydropteridine reductase | |
| 145 | 22415 | NM_022392 | | EST, Highly similar to ISI1_HUMAN INSULIN- | General |
| | | | | INDUCED PROTEIN 1 [H. sapiens], ESTs, | |
| | | | | Highly similar to INSULIN-INDUCED GROWTH | |
| | | | | RESPONSE PROTEIN CL-6 [R. norvegicus], | |
| | | | | Mus musculus, clone MGC: 1894 | |
| | | | | IMAGE: 424711, mRNA, complete cds, insulin | |
| | | | | induced gene 1, insulin induced protein 2 | |
| 146 | 23705 | NM_022396 | | EST, Weakly similar to I39159 GTP-binding | h |
| | | | | regulatory protein gamma-11 chain [H. sapiens], | |
| | | | | ESTs, Moderately similar to GBGB_HUMAN | |
| | | | | GUANINE NUCLEOTIDE-BINDING PROTEIN | |
| | | | | G(l)/G(S)/G(O) GAMMA-11 SUBUNIT | |
| | | | | [R. norvegicus], ESTs, Weakly similar to | |
| | | | | GBGB_HUMAN GUANINE NUCLEOTIDE- | |
| | | | | BINDING PROTEIN G(l)/G(S)/G(O) GAMMA- | |
| | | | | 11 SUBUNIT [R. norvegicus], RIKEN cDNA | |
| | | | | 6137B21 gene, expressed sequence AV96488, | |
| | | | | guanine nucleotide binding protein (G protein), | |
| | | | | gamma 1 subunit, guanine nucleotide binding | |
| | | | | protein (G protein), gamma transducing activity | |
| | | | | polypeptide 1, guanine nucleotide binding | |
| | | | | protein (G protein), gamma transducing activity | |
| | | | | polypeptide 2, guanine nucleotide binding | |
| | | | | protein 11 | |
| 147 | 23300 | NM_022398 | | ESTs, Weakly similar to M2OM RAT | h |
| | | | | MITOCHONDRIAL 2- | |
| | | | | OXOGLUTARATE/MALATE CARRIER | |
| | | | | PROTEIN [R. norvegicus], ESTs, Weakly similar | |
| | | | | to M2OM_HUMAN MITOCHONDRIAL 2- | |
| | | | | OXOGLUTARATE/MALATE CARRIER | |
| | | | | PROTEIN [H. sapiens], RIKEN cDNA | |
| | | | | 363241G24 gene, RIKEN cDNA 4933433D23 | |
| | | | | gene, solute carrier family 25 (mitochondrial | |
| | | | | carrier, brain), member 14, solute carrier family | |
| | | | | 25 (mitochondrial carrier; dicarboxylate | |
| | | | | transporter), member 1, solute carrier family 25 | |
| | | | | (mitochondrial carrier; oxoglutarate carrier), | |
| | | | | member 11 | |
| 148 | 24536 | NM_022399 | | ESTs, Weakly similar to CALRETICULIN | c |
| | | | | PRECURSOR [R. norvegicus], Homo sapiens, | |
| | | | | Similar to RIKEN cDNA 1731L1 gene, clone | |
| | | | | MGC: 26577 IMAGE: 48221, mRNA, complete | |
| | | | | cds, RIKEN cDNA 1731L1 gene, RIKEN cDNA | |
| | | | | 633586I2 gene, calreticulin | |
| 149 | 20915 | NM_022407 | aldehyde dehydrogenase | EST, Moderately similar to A Chain A, Human | General |
| | | | 1 family, member A1, | Mitochondrial Aldehyde Dehydrogenase | |
| | | | aldehyde dehydrogenase | Complexed With Nad+ And Mn2+ {SUB 24-517 | |
| | | | family 1, subfamily A1 | [H. sapiens], ESTs, Moderately similar to | |
| | | | | ALDEHYDE DEHYDROGENASE, | |
| | | | | MITOCHONDRIAL PRECURSOR | |
| | | | | [R. norvegicus], RIKEN cDNA 277F14 gene, | |
| | | | | aldehyde dehydrogenase 1 family, member B1, | |
| | | | | aldehyde dehydrogenase 2 family | |
| | | | | (mitochondrial), aldehyde dehydrogenase 2, | |
| | | | | mitochondrial, aldehyde dehydrogenase 9 | |
| | | | | family, member A1, aldehyde dehydrogenase | |
| | | | | 9, subfamily A1 | |
| 150 | 8212 | NM_022500 | ferritin light chain 1, | ESTs, Highly similar to FRHUL ferritin light | General |
| | | | ferritin, light polypeptide | chain [H. sapiens], ESTs, Moderately similar to | |
| | | | | FRHUL ferritin light chain [H. sapiens], PRO47 | |
| | | | | protein, RIKEN cDNA 4933416E14 gene, | |
| | | | | ferritin light chain 2, ferritin, light polypeptide | |
| 151 | 1867 | NM_022510 | | ESTs, Moderately similar to RL4_HUMAN 6S | General |
| | | | | RIBOSOMAL PROTEIN L4 [H. sapiens], H19, | |
| | | | | imprinted maternally expressed untranslated | |
| | | | | mRNA, Homo sapiens cDNA: FLJ23366 fis, | |
| | | | | clone HEP15665 | |
| 152 | 4242 | NM_022521 | | ESTs, Highly similar to ORNITHINE | f |
| | | | | AMINOTRANSFERASE PRECURSOR | |
| | | | | [R. norvegicus], RIKEN cDNA 1319H2 gene, | |
| | | | | RIKEN cDNA 296B13 gene, hypothetical | |
| | | | | protein MGC15875, ornithine aminotransferase, | |
| | | | | ornithine aminotransferase (gyrate atrophy) | |
| 153 | 6100 | NM_022531 | | | f, General |
| 154 | 8598 | NM_022538 | | | f |
| 154 | 8597 | NM_022538 | | | b, General |
| 155 | 11039 | NM_022543 | | | General |
| 156 | 20925 | NM_022594 | enoyl Coenzyme A | AU RNA-binding protein/enoyl-coenzyme A | e |
| | | | hydratase 1, peroxisomal, | hydratase, EST, Weakly similar to | |
| | | | enoyl coenzyme A | ECH1_HUMAN DELTA3, 5-DELTA2, 4- | |
| | | | hydratase 1, peroxisomal | DIENOYL-COA ISOMERASE PRECURSO | |
| | | | | [H. sapiens], RIKEN cDNA 2619M2 gene, enoyl | |
| | | | | Coenzyme A hydratase 1, peroxisomal, enoyl | |
| | | | | coenzyme A hydratase 1, peroxisomal, | |
| | | | | expressed sequence AA617331 | |
| 157 | 20944 | NM_022597 | | cathepsin B, lipocalin 7, tubulointerstitial | f, General |
| | | | | nephritis antigen | |
| 158 | 21211 | NM_022607 | | EST, Weakly similar to S23 neurofilament | b, h |
| | | | | triplet H protein - rat [R. norvegicus], ESTs, | |
| | | | | Weakly similar to S23 neurofilament triplet H | |
| | | | | protein - rat [R. norvegicus], KIAA182 protein, | |
| | | | | NADH dehydrogenase (ubiquinone) | |
| | | | | flavoprotein 3 (1 kD) | |
| 159 | 2250 | NM_022643 | | H2B histone family, member D, H2B histone | h |
| | | | | family, member G, H2B histone family, member | |
| | | | | K, RIKEN cDNA 26122J1 gene, expressed | |
| | | | | sequence AI413321, expressed sequence | |
| | | | | R74621 | |
| 160 | 12542 | NM_022647 | | ESTs, Weakly similar to I4841 histone H2b - | f |
| | | | | mouse [M. musculus], H2B histone family, | |
| | | | | member A, H2B histone family, member G, | |
| | | | | H2B histone family, member K, expressed | |
| | | | | sequence AI413321, expressed sequence | |
| | | | | R74621 | |
| 161 | 15727 | NM_022953 | slit (Drosophila) homolog | ESTs, Highly similar to T42626 secreted | General |
| | | | 1, slit homolog 1 | leucine-rich repeat-containing protein SLIT2 - | |
| | | | (Drosophila) | mouse (fragment) [M. musculus], ESTs, Weakly | |
| | | | | similar to T42626 secreted leucine-rich repeat- | |
| | | | | containing protein SLIT2 - mouse (fragment) | |
| | | | | [M. musculus], Homo sapiens mRNA; cDNA | |
| | | | | DKFZp434N435 (from clone DKFZp434N435); | |
| | | | | partial cds, glycoprotein IX (platelet), | |
| | | | | glycoprotein lb (platelet), beta polypeptide, | |
| | | | | glycoprotein lb, beta polypeptide, slit | |
| | | | | (Drosophila) homolog 1, slit (Drosophila) | |
| | | | | homolog 2, slit (Drosophila) homolog 3, slit | |
| | | | | homolog 1 (Drosophila), slit homolog 2 | |
| | | | | (Drosophila), slit homolog 3 (Drosophila) | |
| 162 | 15729 | NM_022955 | | EGF-like-domain, multiple 3, EST, Highly | General |
| | | | | similar to A443 notch protein homolog TAN-1 | |
| | | | | precursor [H. sapiens], EST, Weakly similar to | |
| | | | | A443 notch protein homolog TAN-1 precursor | |
| | | | | [H. sapiens], ESTs, Weakly similar to JH771 | |
| | | | | protein-tyrosine kinase [M. musculus], ESTs, | |
| | | | | Weakly similar to T13954 MEGF6 protein - rat | |
| | | | | [R. norvegicus], Notch (Drosophila) homolog 1 | |
| | | | | (translocation-associated), Notch (Drosophila) | |
| | | | | homolog 2, Notch gene homolog 3, | |
| | | | | (Drosophila), Rattus norvegicus CBL2 (CBL2) | |
| | | | | mRNA, complete cds | |
| 163 | 21239 | NM_024125 | CCAAT/enhancer binding | CCAAT/enhancer binding protein (C/EBP), beta | c, General |
| | | | protein (C/EBP), beta | | |
| 164 | 353 | NM_024127 | growth arrest and DNA- | growth arrest and DNA-damage-inducible 45 | i |
| | | | damage-inducible 45 | alpha, growth arrest and DNA-damage- | |
| | | | alpha, growth arrest and | inducible 45 beta, growth arrest and DNA- | |
| | | | DNA-damage-inducible, | damage-inducible, alpha | |
| | | | alpha | | |
| 165 | 17226 | NM_024131 | D-dopachrome | D-dopachrome tautomerase, expressed | General |
| | | | tautomerase | sequence C78655 | |
| 166 | 24634 | NM_024137 | human immunodeficiency | ESTs, Weakly similar to Z177_HUMAN ZINC | General |
| | | | virus type I enhancer | FINGER PROTEIN 177 [H. sapiens], KIAA1555 | |
| | | | binding protein 2, human | protein, human immunodeficiency virus type I | |
| | | | immunodeficiency virus | enhancer-binding protein 2, human | |
| | | | type I enhancer-binding | immunodeficiency virus type I enhancer-binding | |
| | | | protein 2 | protein 3, kappa B and Rss recognition | |
| | | | | component | |
| 166 | 24632 | NM_024137 | human immunodeficiency | ESTs, Weakly similar to Z177_HUMAN ZINC | a |
| | | | virus type I enhancer | FINGER PROTEIN 177 [H. sapiens], KIAA1555 | |
| | | | binding protein 2, human | protein, human immunodeficiency virus type I | |
| | | | immunodeficiency virus | enhancer-binding protein 2, human | |
| | | | type I enhancer-binding | immunodeficiency virus type I enhancer-binding | |
| | | | protein 2 | protein 3, kappa B and Rss recognition | |
| | | | | component | |
| 167 | 22 | NM_024388 | | nuclear receptor subfamily 4, group A, member 1 | b |
| 168 | 9929 | NM_024392 | | Homo sapiens cDNA FLJ13261 fis, clone | g |
| | | | | OVARC1885, weakly similar to | |
| | | | | OXIDOREDUCTASE UCPA (EC 1.—.—.—), | |
| | | | | Human DNA sequence from clone 168E13 on | |
| | | | | chromosome 2p11.21-12.3. Contains two | |
| | | | | putative novel genes, the gene for a novel | |
| | | | | protein similar to bovine SCP2 (Sterol Carrier | |
| | | | | Protein 2) and part of HSD17B4 | |
| | | | | (hydroxysteroid (17-beta) dehydrogenase 4), an | |
| | | | | EEF1A1 (eukaryotic translation elongation | |
| | | | | factor 1 alpha 1) pseudogene, ESTs, STSs and | |
| | | | | GSSs, RIKEN cDNA 11129G7 gene, RIKEN | |
| | | | | cDNA 171M22 gene, RIKEN cDNA 18126B4 | |
| | | | | gene, RIKEN cDNA 26127I16 gene, expressed | |
| | | | | sequence AW2883, hydroxysteroid (17-beta) | |
| | | | | dehydrogenase 4, hydroxysteroid 17-beta | |
| | | | | dehydrogenase 4, hypothetical protein | |
| | | | | MGC194, oxidoreductase UCPA, retinal short- | |
| | | | | chain dehydrogenase/reductase 1 | |
| 169 | 3582 | NM_024396 | | ATP-binding cassette, sub-family A (ABC1), | a |
| | | | | member 2, ATP-binding cassette, sub-family A | |
| | | | | (ABC1), member 3, ATP-binding cassette, sub- | |
| | | | | family A (ABC1), member 4, ATP-binding | |
| | | | | cassette, sub-family A (ABC1), member 7, ATP- | |
| | | | | binding cassette, sub-family A (ABC1), member | |
| | | | | 8, ESTs, Weakly similar to ABC2 MOUSE ATP- | |
| | | | | BINDING CASSETTE TRANSPORTER 2 | |
| | | | | [M. musculus], Homo sapiens mRNA for | |
| | | | | KIAA1888 protein, partial cds, hypothetical | |
| | | | | protein FLJ14297, hypothetical protein | |
| | | | | PRO2543 | |
| 170 | 22626 | NM_024400 | | ESTs, Weakly similar to T47158 hypothetical | General |
| | | | | protein DKFZp762C111.1 [H. sapiens], Mus | |
| | | | | musculus papilin mRNA, complete cds, Mus | |
| | | | | musculus, Similar to a disintegrin and | |
| | | | | metalloproteinase with thrombospondin motifs 1 | |
| | | | | (ADAMTS-1), clone IMAGE: 3491991, mRNA, | |
| | | | | partial cds, RIKEN cDNA 672426B9 gene, | |
| | | | | RIKEN cDNA A938K15 gene, a disintegrin-like | |
| | | | | and metalloprotease (reprolysin type) with | |
| | | | | thrombospondin type 1 motif, 1, a disintegrin- | |
| | | | | like and metalloprotease (reprolysin type) with | |
| | | | | thrombospondin type 1 motif, 4, a disintegrin- | |
| | | | | like and metalloprotease (reprolysin type) with | |
| | | | | thrombospondin type 1 motif, 8, a disintegrin- | |
| | | | | like and metalloprotease (reprolysin type) with | |
| | | | | thrombospondin type 1 motif, 9 | |
| 171 | 13633 | NM_024403 | | EST, Weakly similar to ATF4_HUMAN CYCLIC- | General |
| | | | | AMP-DEPENDENT TRANSCRIPTION | |
| | | | | FACTOR ATF-4 [H. sapiens], activating | |
| | | | | transcription factor 4 (tax-responsive enhancer | |
| | | | | element B67), activating transcription factor 5 | |
| 171 | 13634 | NM_024403 | | EST, Weakly similar to ATF4_HUMAN CYCLIC- | General |
| | | | | AMP-DEPENDENT TRANSCRIPTION | |
| | | | | FACTOR ATF-4 [H. sapiens], activating | |
| | | | | transcription factor 4 (tax-responsive enhancer | |
| | | | | element B67), activating transcription factor 5 | |
| 172 | 17917 | NM_024488 | | | a, b |
| 173 | 26164 | NM_030836 | | ESTs, Weakly similar to PSA MOUSE | i |
| | | | | PUROMYCIN-SENSITIVE AMINOPEPTIDASE | |
| | | | | [M. musculus], aminopeptidase, glutamyl | |
| | | | | aminopeptidase, leucyl/cystinyl | |
| | | | | aminopeptidase, thyrotropin-releasing hormone | |
| | | | | degrading ectoenzyme, type 1 tumor necrosis | |
| | | | | factor receptor shedding aminopeptidase | |
| | | | | regulator | |
| 174 | 1221 | NM_030845 | | GRO1 oncogene, GRO2 oncogene, Rattus | General |
| | | | | norvegicus CXC chemokine RTCK1 (Rtck1) | |
| | | | | mRNA, complete cds, interleukin 8, platelet | |
| | | | | factor 4, pro-platelet basic protein, pro-platelet | |
| | | | | basic protein (includes platelet basic protein, | |
| | | | | beta-thromboglobulin, connective tissue- | |
| | | | | activating peptide III, neutrophil-activating | |
| | | | | peptide-2) | |
| 175 | 17342 | NM_030873 | | EST, Weakly similar to A Chain A, Human | d |
| | | | | Platelet Profilin Complexed With The L-Pro1 | |
| | | | | Peptide {SUB 3-14 [H. sapiens], ESTs, Weakly | |
| | | | | similar to profilin [R. norvegicus], RIKEN cDNA | |
| | | | | 1712P12 gene, profilin, profilin 1, profilin 2 | |
| 176 | 23109 | NM_031000 | | EST, Weakly similar to ALCOHOL | c, f, h |
| | | | | DEHYDROGENASE [R. norvegicus], RIKEN | |
| | | | | cDNA 2315E1 gene, aldo-keto reductase family | |
| | | | | 1, member A1 (aldehyde reductase), aldo-keto | |
| | | | | reductase family 1, member A4 (aldehyde | |
| | | | | reductase), aldo-keto reductase family 1, | |
| | | | | member E1 | |
| 177 | 21165 | NM_031005 | actinin, alpha 1 | ESTs, Weakly similar to FAHUAA alpha-actinin | General |
| | | | | 1 [H. sapiens], Homo sapiens, Similar to | |
| | | | | cysteine and histidine-rich protein, clone | |
| | | | | IMAGE: 3945559, mRNA, partial cds, RIKEN | |
| | | | | cDNA 31123F1 gene, actinin alpha 2, actinin | |
| | | | | alpha 3, actinin, alpha 1, actinin, alpha 2, | |
| | | | | actinin, alpha 3, actinin, alpha 4, alpha actinin | |
| | | | | 4, beta-spectrin 2, non-erythrocytic, beta- | |
| | | | | spectrin 3 | |
| 178 | 1845 | NM_031010 | | ESTs, Moderately similar to ARACHIDONATE | a, b, |
| | | | | 12-LIPOXYGENASE [R. norvegicus], | General |
| | | | | arachidonate 12-lipoxygenase, arachidonate 12- | |
| | | | | lipoxygenase pseudogene 2, arachidonate 15- | |
| | | | | lipoxygenase, expressed sequence AW259591 | |
| 178 | 25517 | NM_031010 | | ESTs, Moderately similar to ARACHIDONATE | a, b, |
| | | | | 12-LIPOXYGENASE [R. norvegicus], | General |
| | | | | arachidonate 12-lipoxygenase, arachidonate 12- | |
| | | | | lipoxygenase pseudogene 2, arachidonate 15- | |
| | | | | lipoxygenase, expressed sequence AW259591 | |
| 179 | 15886 | NM_031035 | | guanine nucleotide binding protein (G protein), | c, f |
| | | | | alpha inhibiting activity polypeptide 2, guanine | |
| | | | | nucleotide binding protein, alpha inhibiting 2, | |
| | | | | guanine nucleotide binding protein, alpha | |
| | | | | inhibiting 3 | |
| 180 | 15957 | NM_031050 | | ESTs, Weakly similar to LUM RAT LUMICAN | h |
| | | | | PRECURSOR [R. norvegicus], RIKEN cDNA | |
| | | | | 73349J17 gene, dermatan sulphate | |
| | | | | proteoglycan 3, lumican, osteoglycin | |
| | | | | (osteoinductive factor, mimecan), | |
| | | | | osteomodulin, protein phosphatase 1, | |
| | | | | regulatory (inhibitor) subunit 7 | |
| 181 | 11849 | NM_031065 | | EST, Moderately similar to R1A MOUSE 6S | h, General |
| | | | | RIBOSOMAL PROTEIN L1A [M. musculus], | |
| | | | | EST, Weakly similar to 6S RIBOSOMAL | |
| | | | | PROTEIN L1A [R. norvegicus], ESTs, Highly | |
| | | | | similar to R1A_HUMAN 6S RIBOSOMAL | |
| | | | | PROTEIN L1A [H. sapiens], ribosomal protein | |
| | | | | L1A, ribosomal protein L1a | |
| 182 | 12639 | NM_031099 | | ESTs, Weakly similar to S55912 ribosomal | e, General |
| | | | | protein L5, cytosolic [H. sapiens], ribosomal | |
| | | | | protein L5 | |
| 183 | 20812 | NM_031100 | | EST, Moderately similar to 6S RIBOSOMAL | e |
| | | | | PROTEIN L1 [M. musculus], EST, Moderately | |
| | | | | similar to 6S RIBOSOMAL PROTEIN L1 | |
| | | | | [R. norvegicus], ESTs, Highly similar to A42735 | |
| | | | | ribosomal protein L1, cytosolic [H. sapiens], | |
| | | | | Homo sapiens, Similar to ribosomal protein L1, | |
| | | | | clone MGC: 22634 IMAGE: 3935452, mRNA, | |
| | | | | complete cds, Human DNA sequence from | |
| | | | | clone RP3-334F4 on chromosome 6 Contains | |
| | | | | ESTs, STSs and GSSs. Contains a LAMR1 | |
| | | | | (laminin receptor 1, ribosomal protein SA) | |
| | | | | pseudogene and an RPL1 (ribosomal protein | |
| | | | | L1) pseudogene, Mouse 24.6 kda protein | |
| | | | | mRNA, complete cds, ribosomal protein L1 | |
| 184 | 23854 | NM_031101 | | EST, Moderately similar to JC2368 ribosomal | General |
| | | | | protein L13 - rat [R. norvegicus], EST, | |
| | | | | Moderately similar to S23753 ribosomal protein | |
| | | | | L13, cytosolic [H. sapiens], EST, Weakly similar | |
| | | | | to JC2368 ribosomal protein L13 - rat | |
| | | | | [R. norvegicus], ESTs, Highly similar to S23753 | |
| | | | | ribosomal protein L13, cytosolic [H. sapiens], | |
| | | | | ESTs, Moderately similar to RL13 MOUSE 6S | |
| | | | | RIBOSOMAL PROTEIN L13 [M. musculus], | |
| | | | | ribosomal protein L13 | |
| 185 | 16938 | NM_031103 | | ESTs, Weakly similar to 6S RIBOSOMAL | e |
| | | | | PROTEIN L19 [R. norvegicus], Homo sapiens | |
| | | | | mRNA; cDNA DKFZp434D115 (from clone | |
| | | | | DKFZp434D115), ribosomal protein L19 | |
| 186 | 22205 | NM_031105 | | ESTs, Highly similar to RL44_HUMAN 6S | h |
| | | | | RIBOSOMAL PROTEIN L44 [H. sapiens], | |
| | | | | RIKEN cDNA 24138A3 gene, ribosomal protein | |
| | | | | L36a, ribosomal protein L44 | |
| 187 | 16847 | NM_031109 | | DNA segment, Chr 4, ERATO Doi 429, | g, General |
| | | | | expressed, ESTs, Highly similar to S55918 | |
| | | | | ribosomal protein S1, cytosolic [H. sapiens], | |
| | | | | Homo sapiens cDNA: FLJ217 fis, clone | |
| | | | | COL9849, highly similar to HSU14972 Human | |
| | | | | ribosomal protein S1 mRNA, RIKEN cDNA | |
| | | | | 22142A9 gene, ribosomal protein S1 | |
| 188 | 10878 | NM_031110 | | EST, Weakly similar to 4S RIBOSOMAL | e, General |
| | | | | PROTEIN S11 [R. norvegicus], Homo sapiens | |
| | | | | mRNA; cDNA DKFZp434A326 (from clone | |
| | | | | DKFZp434A326), Human DNA sequence from | |
| | | | | clone RP5-16K6 on chromosome 2p12.1-13. | |
| | | | | Contains an RPS11 (4S ribosomal protein S11) | |
| | | | | pseudogene, ESTs, STSs and GSSs, RAD21 | |
| | | | | homolog (S. pombe), ribosomal protein S11 | |
| 189 | 20839 | NM_031113 | | EST, Moderately similar to S12583 | General |
| | | | | polyubiquitin 4 - mouse [M. musculus], EST, | |
| | | | | Moderately similar to ubiquitin/ribosomal | |
| | | | | protein S27a [R. norvegicus], EST, Weakly | |
| | | | | similar to R27A_HUMAN 4S RIBOSOMAL | |
| | | | | PROTEIN S27A {SUB 77-156 [H. sapiens], | |
| | | | | Homo sapiens cDNA FLJ1163 fis, clone | |
| | | | | HEMBA13926, RIKEN cDNA 616J14 gene, | |
| | | | | expressed sequence AI132487, ribosomal | |
| | | | | protein S27a, ubiquitin C | |
| 190 | 22749 | NM_031116 | | small inducible cytokine A5, small inducible | b |
| | | | | cytokine A5 (RANTES), small inducible | |
| | | | | cytokine subfamily A (Cys-Cys), member 17, | |
| | | | | small inducible cytokine subfamily A (Cys-Cys), | |
| | | | | member 26 | |
| 191 | 1580 | NM_031117 | | EST, Weakly similar to A3327 snRNP protein N | h |
| | | | | [H. sapiens], Homo sapiens RT-LI mRNA, | |
| | | | | complete sequence, RIKEN cDNA 24145I1 | |
| | | | | gene, SNRPN upstream reading frame, WW | |
| | | | | domain binding protein 11, ribosomal protein | |
| | | | | S1, small nuclear ribonucleoprotein B, small | |
| | | | | nuclear ribonucleoprotein N, small nuclear | |
| | | | | ribonucleoprotein polypeptide N, small nuclear | |
| | | | | ribonucleoprotein polypeptides B and B1 | |
| 192 | 13929 | NM_031131 | | Transforming growth factor, beta 3, | General |
| | | | | transforming growth factor, beta 2, transforming | |
| | | | | growth factor, beta 3 | |
| 193 | 15185 | NM_031140 | | EST, Moderately similar to A2574 vimentin | c, General |
| | | | | [H. sapiens], EST, Weakly similar to A2574 | |
| | | | | vimentin [H. sapiens], ESTs, Moderately similar | |
| | | | | to VIME RAT VIMENTIN [R. norvegicus], ESTs, | |
| | | | | Weakly similar to A2574 vimentin [H. sapiens], | |
| | | | | ESTs, Weakly similar to VIME RAT VIMENTIN | |
| | | | | [R. norvegicus], vimentin | |
| 194 | 1638 | NM_031143 | | EST, Weakly similar to JC6124 diacylglycerol | General |
| | | | | kinase (EC 2.7.1.17) IV - rat [R. norvegicus], | |
| | | | | ESTs, Highly similar to KDGZ_HUMAN | |
| | | | | DIACYLGLYCEROL KINASE, ZETA | |
| | | | | (DIGLYCERIDE KINASE) (DGK-ZETA) (DAG | |
| | | | | KINASE ZETA) [H. sapiens], ESTs, Weakly | |
| | | | | similar to JC6124 diacylglycerol kinase (EC | |
| | | | | 2.7.1.17) IV - rat [R. norvegicus], ESTs, Weakly | |
| | | | | similar to KDGA MOUSE DIACYLGLYCEROL | |
| | | | | KINASE, ALPHA [M. musculus], diacylglycerol | |
| | | | | kinase, alpha (8 kDa), diacylglycerol kinase, | |
| | | | | iota, diacylglycerol kinase, zeta (14 kD) | |
| 195 | 21624 | NM_031144 | | EST, Weakly similar to ACTB_HUMAN ACTIN, | g |
| | | | | CYTOPLASMIC 1 [R. norvegicus], ESTs, Highly | |
| | | | | similar to ATHUB actin beta [H. sapiens], ESTs, | |
| | | | | Weakly similar to ACTB_HUMAN ACTIN, | |
| | | | | CYTOPLASMIC 1 [R. norvegicus], Homo | |
| | | | | sapiens FKSG3 (FKSG3) mRNA, complete | |
| | | | | cds, RIKEN cDNA 1752K15 gene, RIKEN | |
| | | | | cDNA 1761J2 gene, actin, beta, actin-like 7a, | |
| | | | | actin-related protein 3-beta, melanoma X-actin | |
| 196 | 15277 | NM_031237 | | EST, Moderately similar to UB5B_HUMAN | g, i, |
| | | | | UBIQUITIN-CONJUGATING ENZYME E2-17 | General |
| | | | | KD 2 [R.norvegicus], ESTs, Moderately similar | |
| | | | | to I59365 ubiquitin conjugating enzyme | |
| | | | | [H. sapiens], ESTs, Moderately similar to | |
| | | | | UB5B_HUMAN UBIQUITIN-CONJUGATING | |
| | | | | ENZYME E2-17 KD 2 [M. musculus], RIKEN | |
| | | | | cDNA 111F19 gene, RIKEN cDNA 1628I17 | |
| | | | | gene, RIKEN cDNA 2784L22 gene, Rattus | |
| | | | | norvegicus clone ubc2e ubiquitin conjugating | |
| | | | | enzyme (E217 kB) mRNA, complete cds, | |
| | | | | expressed sequence AL22654, ubiquitin- | |
| | | | | conjugating enzyme E2D 1 (homologous to | |
| | | | | yeast UBC4/5), ubiquitin-conjugating enzyme | |
| | | | | E2D 2, ubiquitin-conjugating enzyme E2D 2 | |
| | | | | (homologous to yeast UBC4/5), ubiquitin- | |
| | | | | conjugating enzyme E2D 3 (homologous to | |
| | | | | yeast UBC4/5) | |
| 197 | 18597 | NM_031325 | | UDP-glucose dehydrogenase | General |
| 198 | 11258 | NM_031327 | | ESTs, Moderately similar to CYR6 MOUSE | General |
| | | | | CYR61 PROTEIN PRECURSOR [M. musculus], | |
| | | | | cysteine rich protein 61, cysteine-rich, | |
| | | | | angiogenic inducer, 61 | |
| 199 | 18654 | NM_031358 | | expressed sequence AI842722, potassium | i, General |
| | | | | inwardly rectifying channel, subfamily J, | |
| | | | | member 11, potassium inwardly-rectifying | |
| | | | | channel, subfamily J, member 11 | |
| 200 | 12581 | NM_031514 | Janus kinase 2, Janus | ESTs, Weakly similar to JAK2 RAT TYROSINE- | i, General |
| | | | kinase 2 (a protein | PROTEIN KINASE JAK2 [R. norvegicus], Janus | |
| | | | tyrosine kinase) | kinase 2, Janus kinase 2 (a protein tyrosine | |
| | | | | kinase), expressed sequence C81284 | |
| 201 | 20449 | NM_031530 | small inducible cytokine | EST, Weakly similar to SY2 RAT SMALL | g, General |
| | | | A2, small inducible | INDUCIBLE CYTOKINE A2 PRECURSOR | |
| | | | cytokine A2 (monocyte | [R. norvegicus], expressed sequence AI323594, | |
| | | | chemotactic protein 1, | expressed sequence AW987545, small | |
| | | | homologous to mouse Sig | inducible cytokine A2, small inducible cytokine | |
| | | | je) | A24, small inducible cytokine A7 (monocyte | |
| | | | | chemotactic protein 3), small inducible cytokine | |
| | | | | subfamily A (Cys-Cys), member 17 | |
| 201 | 20448 | NM_031530 | small inducible cytokine | EST, Weakly similar to SY2 RAT SMALL | g |
| | | | A2, small inducible | INDUCIBLE CYTOKINE A2 PRECURSOR | |
| | | | cytokine A2 (monocyte | [R. norvegicus], expressed sequence AI323594, | |
| | | | chemotactic protein 1, | expressed sequence AW987545, small | |
| | | | homologous to mouse Sig | inducible cytokine A2, small inducible cytokine | |
| | | | je) | A24, small inducible cytokine A7 (monocyte | |
| | | | | chemotactic protein 3), small inducible cytokine | |
| | | | | subfamily A (Cys-Cys), member 17 | |
| 202 | 445 | NM_031535 | BCL2-like 1, Bcl2-like | BCL2-like 1, BCL2-like 2, Bcl-2-related ovarian | b |
| | | | | killer protein, Bcl-2-related ovarian killer protein- | |
| | | | | like, Bcl-w protein, Bcl2-like, Bcl2-like 2 | |
| 203 | 4011 | NM_031543 | cytochrome P45, 2e1, | cytochrome P45, 2e1, ethanol inducible, | a |
| | | | ethanol inducible, | cytochrome P45, subfamily IIE (ethanol- | |
| | | | cytochrome P45, | inducible) | |
| | | | subfamily IIE (ethanol- | | |
| | | | inducible) | | |
| 204 | 18389 | NM_031545 | natriuretic peptide | expressed sequence AA48272, natriuretic | i, General |
| | | | precursor B, natriuretic | peptide precursor B, natriuretic peptide | |
| | | | peptide precursor type B | precursor type B | |
| 205 | 692 | NM_031557 | prostaglandin I2 | EST, Highly similar to PTGI_RAT | h |
| | | | (prostacyclin) synthase | PROSTACYCLIN SYNTHASE | |
| | | | | (PROSTAGLANDIN 12 SYNTHASE) | |
| | | | | [R. norvegicus], cytochrome P45, 8b1, sterol 12 | |
| | | | | alpha-hydrolase, cytochrome P45, subfamily | |
| | | | | VIIIB (sterol 12-alpha-hydroxylase), polypeptide | |
| | | | | 1, prostaglandin I2 (prostacyclin) synthase | |
| 206 | 18318 | NM_031561 | CD36 antigen, CD36 | CD36 antigen, CD36 antigen (collagen type I | h |
| | | | antigen (collagen type I | receptor, thrombospondin receptor) | |
| | | | receptor, thrombospondin | | |
| | | | receptor) | | |
| 207 | 24219 | NM_031579 | protein tyrosine | protein tyrosine phosphatase 4a1, protein | General |
| | | | phosphatase 4a1, protein | tyrosine phosphatase 4a2, protein tyrosine | |
| | | | tyrosine phosphatase | phosphatase type IVA, member 1, protein | |
| | | | type IVA, member 1 | tyrosine phosphatase type IVA, member 2, | |
| | | | | protein tyrosine phosphatase type IVA, member 3 | |
| 208 | 24235 | NM_031614 | thioredoxin reductase 1 | Mus musculus adult male small intestine cDNA, | General |
| | | | | RIKEN full-length enriched library, clone: 211F3, | |
| | | | | full insert sequence, glutathione reductase 1, | |
| | | | | thioredoxin reductase 1, thioredoxin reductase | |
| | | | | 2, thioredoxin reductase beta | |
| 209 | 567 | NM_031628 | nuclear receptor | ESTs, Moderately similar to NR42 MOUSE | General |
| | | | subfamily 4, group A, | ORPHAN NUCLEAR RECEPTOR NURR1 | |
| | | | member 3 | [M. musculus], nuclear receptor subfamily 4, | |
| | | | | group A, member 2, nuclear receptor subfamily | |
| | | | | 4, group A, member 3 | |
| 210 | 211 | NM_031664 | solute carrier family 28 | solute carrier family 28 (sodium-coupled | c |
| | | | (sodium-coupled | nucleoside transporter), member 2, solute | |
| | | | nucleoside transporter), | carrier family 28 (sodium-coupled nucleoside | |
| | | | member 2 | transporter), member 3 | |
| 211 | 18403 | NM_031677 | four and a half LIM | EST, Weakly similar to SLI3 RAT SKELETAL | g |
| | | | domains 2 | MUSCLE LIM-PROTEIN 3 [R. norvegicus], | |
| | | | | RIKEN cDNA 23126N9 gene, activator of | |
| | | | | CREM in testis, four and a half LIM domains 2, | |
| | | | | four and a half LIM domains 3, vascular Rab- | |
| | | | | GAP/TBC-containing | |
| 212 | 20743 | NM_031684 | solute carrier family 29 | ESTs, Weakly similar to ENT1_RAT | f, g, |
| | | | (nucleoside transporters), | EQUILIBRATIVE NUCLEOSIDE | General |
| | | | member 1 | TRANSPORTER 1 (EQUILIBRATIVE | |
| | | | | NITROBENZYLMERCAPTOPURINE | |
| | | | | RIBOSIDE-SENSITIVE NUCLEOSIDE | |
| | | | | TRANSPORTER) (EQUILIBRATIVE NBMPR- | |
| | | | | SENSITIVE NUCLEOSIDE TRANSPORTER) | |
| | | | | (NUCLEOSIDE TRANSPORTER, ES-TYPE) | |
| | | | | [R. norvegicus], RIKEN cDNA 4933435C21 | |
| | | | | gene, hypothetical protein FLJ1116, solute | |
| | | | | carrier family 29 (nucleoside transporters), | |
| | | | | member 1, solute carrier family 29 (nucleoside | |
| | | | | transporters), member 2 | |
| 213 | 21575 | NM_031698 | ribophorin II | EST, Moderately similar to RIB2_HUMAN | b |
| | | | | DOLICHYL-DIPHOSPHOOLIGOSACCHARIDE - | |
| | | | | PROTEIN GLYCOSYLTRANSFERASE 63 | |
| | | | | KDA SUBUNIT PRECURSOR [H. sapiens], | |
| | | | | ESTs, Moderately similar to DOLICHYL- | |
| | | | | DIPHOSPHOOLIGOSACCHARIDE - PROTEIN | |
| | | | | GLYCOSYLTRANSFERASE 63 KD SUBUNIT | |
| | | | | PRECURSOR [R. norvegicus], ESTs, | |
| | | | | Moderately similar to RIB2_HUMAN | |
| | | | | DOLICHYL-DIPHOSPHOOLIGOSACCHARIDE - | |
| | | | | PROTEIN GLYCOSYLTRANSFERASE 63 | |
| | | | | KDA SUBUNIT PRECURSOR [H. sapiens], | |
| | | | | ribophorin 2, related sequence 1, ribophorin II | |
| 214 | 16918 | NM_031709 | | ESTs, Highly similar to R3HU12 ribosomal | e, General |
| | | | | protein S12, cytosolic [H. sapiens], | |
| | | | | mitochondrial ribosomal protein L5, ribosomal | |
| | | | | protein S12 | |
| 215 | 19050 | NM_031719 | | ESTs, Highly similar to ICLN_HUMAN | General |
| | | | | CHLORIDE CONDUCTANCE REGULATORY | |
| | | | | PROTEIN ICLN [H. sapiens], RIKEN cDNA | |
| | | | | 26136D6 gene, RIKEN cDNA 2611O4 gene, | |
| | | | | chloride channel, nucleotide-sensitive, 1A | |
| 215 | 19048 | NM_031719 | | ESTs, Highly similar to ICLN_HUMAN | f |
| | | | | CHLORIDE CONDUCTANCE REGULATORY | |
| | | | | PROTEIN ICLN [H. sapiens], RIKEN cDNA | |
| | | | | 26136D6 gene, RIKEN cDNA 2611O4 gene, | |
| | | | | chloride channel, nucleotide-sensitive, 1A | |
| 216 | 3549 | NM_031723 | | RIKEN cDNA 18129G24 gene, Rattus | h |
| | | | | norvegicus mRNA for signal peptidase 21 kDa | |
| | | | | subunit, complete cds, signal peptidase | |
| | | | | complex (18 kD), similar to signal peptidase | |
| | | | | complex (18 kD) | |
| 217 | 14184 | NM_031776 | | guanine deaminase | General |
| 217 | 14185 | NM_031776 | | guanine deaminase | General |
| 218 | 1169 | NM_031789 | | ESTs, Highly similar to NFL2 RAT NUCLEAR | a |
| | | | | FACTOR ERYTHROID 2 RELATED FACTOR | |
| | | | | 2 [R. norvegicus], ESTs, Weakly similar to NFL2 | |
| | | | | RAT NUCLEAR FACTOR ERYTHROID 2 | |
| | | | | RELATED FACTOR 2 [R. norvegicus], nuclear | |
| | | | | factor (erythroid-derived 2)-like 2, nuclear, | |
| | | | | factor, erythroid derived 2, like 2 | |
| 219 | 17195 | NM_031814 | G protein-coupled | EST, Weakly similar to T42627 ADP- | g |
| | | | receptor kinase-interactor 1 | ribosylation factor-directed GTPase activating | |
| | | | | protein, isoform a - mouse [M. musculus], ESTs, | |
| | | | | Highly similar to T42627 ADP-ribosylation | |
| | | | | factor-directed GTPase activating protein, | |
| | | | | isoform a - mouse [M. musculus], G protein- | |
| | | | | coupled receptor kinase-interactor 1, G protein- | |
| | | | | coupled receptor kinase-interactor 2, Homo | |
| | | | | sapiens p95 paxillin-kinase linker mRNA, | |
| | | | | complete cds, RIKEN cDNA 173C1 gene, | |
| | | | | development and differentiation enhancing | |
| 220 | 17535 | NM_031816 | | ESTs, Weakly similar to GBLP_HUMAN | h |
| | | | | GUANINE NUCLEOTIDE-BINDING PROTEIN | |
| | | | | BETA SUBUNIT-LIKE PROTEIN 12.3 | |
| | | | | [R. norvegicus], Homo sapiens cDNA: | |
| | | | | FLJ21913 fis, clone HEP3888, Homo sapiens, | |
| | | | | clone IMAGE: 35217, mRNA, partial cds, RAE1 | |
| | | | | (RNA export 1, S.pombe) homolog, WD repeat | |
| | | | | domain 1, expressed sequence AI173248, | |
| | | | | expressed sequence AI54353, guanine | |
| | | | | nucleotide binding protein (G protein), beta | |
| | | | | polypeptide 2-like 1, guanine nucleotide binding | |
| | | | | protein, beta 2, related sequence 1, | |
| | | | | retinoblastoma binding protein 7, | |
| | | | | retinoblastoma-binding protein 7, transducin | |
| | | | | (beta)-like 2 | |
| 221 | 15840 | NM_031817 | osteomodulin | fibromodulin, fibronectin leucine rich | g, General |
| | | | | transmembrane protein 3, keratocan, | |
| | | | | osteomodulin, proline arginine-rich end leucine- | |
| | | | | rich repeat protein | |
| 222 | 2655 | NM_031821 | serum-inducible kinase | ESTs, Highly similar to A57286 probable | i |
| | | | | serine/threonine protein kinase [M. musculus], | |
| | | | | ESTs, Highly similar to SNK_RAT | |
| | | | | SERINE/THREONINE-PROTEIN KINASE SNK | |
| | | | | (SERUM INDUCIBLE KINASE) [R. norvegicus], | |
| | | | | ESTs, Weakly similar to SNK_RAT | |
| | | | | SERINE/THREONINE-PROTEIN KINASE SNK | |
| | | | | (SERUM INDUCIBLE KINASE) [R. norvegicus], | |
| | | | | cytokine-inducible kinase, serine/threonine | |
| | | | | kinase 18, serum-inducible kinase, tousled-like | |
| | | | | kinase 2 (Arabidopsis) | |
| 223 | 3251 | NM_031825 | | ESTs, Highly similar to 171348A fibrillin | b |
| | | | | [H. sapiens], ESTs, Weakly similar to TGFB | |
| | | | | RAT LATENT TRANSFORMING GROWTH | |
| | | | | FACTOR BETA BINDING PROTEIN 1 | |
| | | | | PRECURSOR [R. norvegicus], RIKEN cDNA | |
| | | | | 1315B4 gene, RIKEN cDNA 23146A13 gene, | |
| | | | | fibrillin 1, fibrillin 1 (Marfan syndrome), latent | |
| | | | | transforming growth factor beta binding protein | |
| | | | | 1, transforming growth factor-beta (TGF-beta) | |
| | | | | masking protein large subunit | |
| 223 | 3252 | NM_031825 | | ESTs, Highly similar to 171348A fibrillin | c |
| | | | | [H. sapiens], ESTs, Weakly similar to TGFB | |
| | | | | RAT LATENT TRANSFORMING GROWTH | |
| | | | | FACTOR BETA BINDING PROTEIN 1 | |
| | | | | PRECURSOR [R. norvegicus], RIKEN cDNA | |
| | | | | 1315B4 gene, RIKEN cDNA 23146A13 gene, | |
| | | | | fibrillin 1, fibrillin 1 (Marfan syndrome), latent | |
| | | | | transforming growth factor beta binding protein | |
| | | | | 1, transforming growth factor-beta (TGF-beta) | |
| | | | | masking protein large subunit | |
| 224 | 22321 | NM_031832 | lectin, galactose binding, | EST, Weakly similar to X-Ray Crystal Structure | g, General |
| | | | soluble 3, lectin, | Of The Human Galectin-3 Carbohydrate | |
| | | | galactoside-binding, | Recognition Domain [H. sapiens], galectin- | |
| | | | soluble, 3 (galectin 3) | related inter-fiber protein | |
| 225 | 4749 | NM_031834 | | expressed sequence AI26689, expressed | c, d |
| | | | | sequence AI853643, sulfotransferase family | |
| | | | | 1A, phenol-preferring, member 1, | |
| | | | | sulfotransferase family 4A, member 1, | |
| | | | | sulfotransferase family, cytosolic, 1A, phenol- | |
| | | | | preferring, member 1, sulfotransferase family, | |
| | | | | cytosolic, 1A, phenol-preferring, member 2, | |
| | | | | sulfotransferase family, cytosolic, 1A, phenol- | |
| | | | | preferring, member 3 | |
| 226 | 15603 | NM_031851 | prohibitin | B-cell receptor associated protein 37 (BAP-37) | i |
| | | | | mRNA, partial cds and 3′ untranslated | |
| | | | | sequence, B-cell receptor-associated protein | |
| | | | | 37, EST, Moderately similar to PROHIBITIN | |
| | | | | [R. norvegicus], EST, Weakly similar to PHB | |
| | | | | MOUSE PROHIBITIN [M. musculus], ESTs, | |
| | | | | Moderately similar to PHB MOUSE | |
| | | | | PROHIBITIN [M. musculus], ESTs, Weakly | |
| | | | | similar to PHB_HUMAN PROHIBITI | |
| | | | | [H. sapiens], Homo sapiens, clone MGC: 2874 | |
| | | | | IMAGE: 4547239, mRNA, complete cds, | |
| | | | | hypothetical protein MGC1371, prohibitin | |
| 227 | 22300 | NM_031967 | | N-myc downstream regulated, N-myc | c |
| | | | | downstream regulated 1, N-myc downstream | |
| | | | | regulated 2, N-myc downstream regulated-like, | |
| | | | | N-myc downstream-regulated gene 2, NDRG | |
| | | | | family, member 4, expressed sequence | |
| | | | | R74996 | |
| 228 | 17735 | NM_031970 | | EST, Weakly similar to HHHU27 heat shock | g, i, |
| | | | | protein 27 [H. sapiens], ESTs, Moderately | General |
| | | | | similar to HHHU27 heat shock protein 27 | |
| | | | | [H. sapiens], crystallin, alpha C, heat shock | |
| | | | | 27 kD protein 1, heat shock 27 kD protein 3 | |
| 228 | 17734 | NM_031970 | | EST, Weakly similar to HHHU27 heat shock | g, i, |
| | | | | protein 27 [H. sapiens], ESTs, Moderately | General |
| | | | | similar to HHHU27 heat shock protein 27 | |
| | | | | [H. sapiens], crystallin, alpha C, heat shock | |
| | | | | 27 kD protein 1, heat shock 27 kD protein 3 | |
| 228 | 17736 | NM_031970 | | EST, Weakly similar to HHHU27 heat shock | f, g, i, |
| | | | | protein 27 [H. sapiens], ESTs, Moderately | General |
| | | | | similar to HHHU27 heat shock protein 27 | |
| | | | | [H. sapiens], crystallin, alpha C, heat shock | |
| | | | | 27 kD protein 1, heat shock 27 kD protein 3 | |
| 229 | 18500 | NM_031984 | calbindin 1, (28 kD), | ESTs, Moderately similar to CALBINDIN | c |
| | | | calbindin-28 K | [M. musculus], calbindin 1, (28 kD), calbindin- | |
| | | | | 28 K | |
| 230 | 18899 | NM_031985 | | EST, Highly similar to TVRTK6 ribosomal | a |
| | | | | protein S6 kinase [R. norvegicus], ESTs, Highly | |
| | | | | similar to K6B1_HUMAN RIBOSOMAL | |
| | | | | PROTEIN S6 KINASE [H. sapiens], ESTs, | |
| | | | | Moderately similar to K6B2_MOUSE | |
| | | | | RIBOSOMAL PROTEIN S6 KINASE BETA 2 | |
| | | | | (S6K-BETA 2) (7 KDA RIBOSOMAL PROTEIN | |
| | | | | S6 KINASE 2) (P7-S6KB) (P7 RIBOSOMAL S6 | |
| | | | | KINASE BETA) (P7 S6KBETA) (S6K2) | |
| | | | | [M. musculus], RIKEN cDNA 261318I15 gene, | |
| | | | | expressed sequence AW319595, hypothetical | |
| | | | | protein FLJ14813, ribosomal protein S6 kinase, | |
| | | | | 7 kD, polypeptide 1, ribosomal protein S6 | |
| | | | | kinase, 7 kD, polypeptide 2 | |
| 231 | 19768 | NM_031986 | | ESTs, Highly similar to APB1 RAT AMYLOID | i |
| | | | | BETA A4 PRECURSOR PROTEIN-BINDING | |
| | | | | FAMILY A MEMBER 1 [R. norvegicus], Mus | |
| | | | | musculus, Similar to hypothetical protein, clone | |
| | | | | MGC: 1174 IMAGE: 3964815, mRNA, complete | |
| | | | | cds, RIKEN cDNA 2318D1 gene, amyloid beta | |
| | | | | (A4) precursor protein-binding, family A, | |
| | | | | APBA1: amyloid beta (A4) precursor protein- | |
| | | | | binding, family A, member 1 (X11), amyloid | |
| | | | | beta (A4) precursor protein-binding, family A, | |
| | | | | member 1 (X11), amyloid beta (A4) precursor | |
| | | | | protein-binding, family A, member 3, syndecan | |
| | | | | binding protein, syndecan binding protein | |
| | | | | (syntenin), syntenin-2 protein | |
| 232 | 17829 | NM_033234 | hemoglobin beta chain | | a, c |
| | | | complex, hemoglobin, | | |
| | | | beta | | |
| 232 | 25468 | NM_033234 | | | a, b |
| 232 | 25469 | NM_033234 | | | a, b |
| | | | | | General |
| 232 | 17832 | NM_033234 | hemoglobin beta chain | | a, b |
| | | | complex, hemoglobin, | | General |
| | | | beta | | |
| 233 | 12364 | NM_033351 | Fc fragment of IgG, | EST, Weakly similar to A Chain A, Crystal | General |
| | | | receptor, transporter, | Structure Of The Human Mhc-Related Fc | |
| | | | alpha, Fc receptor, IgG, | Receptor {SUB 24-29 [H. sapiens] , Fc fragment | |
| | | | alpha chain transporter | of IgG, receptor, transporter, alpha, Fc | |
| | | | | receptor, IgG, alpha chain transporter | |
| 234 | 11714 | NM_033352 | | | General |
| 235 | 15867 | NM_053289 | pancreatitis-associated | ESTs, Highly similar to PAP1_HUMAN | General |
| | | | protein, poly(A) | PANCREATITIS-ASSOCIATED PROTEIN 1 | |
| | | | polymerase alpha | PRECURSOR [H. sapiens], islet neogenesis | |
| | | | | associated protein-related protein, pancreatitis- | |
| | | | | associated protein | |
| 236 | 4093 | NM_053290 | phosphoglycerate mutase | | General |
| | | | 1, phosphoglycerate | | |
| | | | mutase 1 (brain) | | |
| 237 | 16886 | NM_053291 | | EST, Highly similar to PGK2 RAT | c |
| | | | | PHOSPHOGLYCERATE KINASE, TESTIS | |
| | | | | SPECIFIC [R. norvegicus], Phosphoglycerate | |
| | | | | kinase {alternatively spliced} [human, | |
| | | | | phosphoglycerate kinase deficient patient with | |
| | | | | episodes of muscl, mRNA Partial Mutant, 37 | |
| | | | | nt], phosphoglycerate kinase 1, | |
| | | | | phosphoglycerate kinase 2 | |
| 238 | 14928 | NM_053330 | ribosomal protein L21 | EST, Moderately similar to 21132B ribosomal | e, h |
| | | | | protein L21 [H. sapiens], EST, Moderately | |
| | | | | similar to RL21 MOUSE 6S RIBOSOMAL | |
| | | | | PROTEIN L21 [M. musculus], EST, Weakly | |
| | | | | similar to 21132B ribosomal protein L21 | |
| | | | | [H. sapiens], EST, Weakly similar to RL21 | |
| | | | | MOUSE 6S RIBOSOMAL PROTEIN L21 | |
| | | | | [M. musculus], EST, Weakly similar to | |
| | | | | RL21_HUMAN 6S RIBOSOMAL PROTEIN L21 | |
| | | | | [H. sapiens], ESTs, Moderately similar to RL21 | |
| | | | | RAT 6S RIBOSOMAL PROTEIN L21 | |
| | | | | [R. norvegicus], RIKEN cDNA 2785M18 gene, | |
| | | | | ribosomal protein L21 | |
| 239 | 1609 | NM_053338 | Ras-related associated | ESTs, Weakly similar to RAD RAT GTP- | c, General |
| | | | | BINDING PROTEIN RAD [R. norvegicus], GTP | |
| | | | | binding protein (gene overexpressed in skeletal | |
| | | | | muscle), Ras-related associated with diabetes | |
| 240 | 9353 | NM_053347 | LIS1-interacting protein | Homo sapiens cDNA FLJ1349 fis, clone | General |
| | | | NUDE1, rat homolog, | NT2RP31428, highly similar to | |
| | | | nuclear distribution gene | NUCLEOPROTEIN TPR, Leman coiled-coil | |
| | | | E homolog (Aspergillus) | protein, RIKEN cDNA 4932416D9 gene, Rho- | |
| | | | | associated coiled-coil forming kinase 2, nuclear | |
| | | | | distribution gene E homolog (Aspergillus), | |
| | | | | translocated promoter region (to activated MET | |
| | | | | oncogene) | |
| 241 | 6155 | NM_053356 | collagen, type I, alpha 2, | ESTs, Weakly similar to CGHU2S collagen | e |
| | | | procollagen, type I, alpha 2 | alpha 2(l) chain precursor [H. sapiens], KIAA126 | |
| | | | | protein, RIKEN cDNA 1113G5 gene, RIKEN | |
| | | | | cDNA 9349G11 gene, collagen, type I, alpha 1, | |
| | | | | collagen, type I, alpha 2, collagen, type II, alpha | |
| | | | | 1 (primary osteoarthritis, spondyloepiphyseal | |
| | | | | dysplasia, congenital), hypothetical protein | |
| | | | | FLJ2654, nischarin, procollagen, type I, alpha | |
| | | | | 1, procollagen, type I, alpha 2, procollagen, | |
| | | | | type II, alpha 1 | |
| 241 | 6156 | NM_053356 | collagen, type I, alpha 2, | ESTs, Weakly similar to CGHU2S collagen | e |
| | | | procollagen, type I, alpha 2 | alpha 2(I) chain precursor [H. sapiens], KIAA126 | |
| | | | | protein, RIKEN cDNA 1113G5 gene, RIKEN | |
| | | | | cDNA 9349G11 gene, collagen, type I, alpha 1, | |
| | | | | collagen, type I, alpha 2, collagen, type II, alpha | |
| | | | | 1 (primary osteoarthritis, spondyloepiphyseal | |
| | | | | dysplasia, congenital), hypothetical protein | |
| | | | | FLJ2654, nischarin, procollagen, type I, alpha | |
| | | | | 1, procollagen, type I, alpha 2, procollagen, | |
| | | | | type II, alpha 1 | |
| 242 | 16017 | NM_053401 | | X-linked protein, brain expressed, X-linked 1, | i |
| | | | | hypothetical protein FLJ197, nerve growth | |
| | | | | factor receptor (TNFRSF16) associated protein 1 | |
| 243 | 2242 | NM_053433 | | ESTs, Highly similar to FMO3_HUMAN | d, General |
| | | | | DIMETHYLANILINE MONOOXYGENASE | |
| | | | | [H. sapiens], Flavin-containing monooxygenase | |
| | | | | 1, Homo sapiens DNA sequence from PAC | |
| | | | | 127D3 on chromosome 1q23-25. Contains | |
| | | | | FMO2 and FMO3 genes for Flavin-containing | |
| | | | | Monooxygenase 2 and Flavin-containing | |
| | | | | Monooxygenase 3 (Dimethylaniline | |
| | | | | Monooxygenase (N-Oxide 3, EC1.14.13.8, | |
| | | | | Dimethylaniline Oxidase 3, FMO II, FMO 3), | |
| | | | | and a gene for another, unknown, Flavin- | |
| | | | | containing Monooxygenase family protein. | |
| | | | | Contains ESTs and GSSs, flavin containing | |
| | | | | monooxygenase 1, flavin containing | |
| | | | | monooxygenase 2, flavin containing | |
| | | | | monooxygenase 3, hypothetical protein | |
| | | | | PRO1257 | |
| 244 | 8085 | NM_053453 | | ESTs, Moderately similar to RGS8 RAT | General |
| | | | | REGULATOR OF G-PROTEIN SIGNALING 8 | |
| | | | | [R. norvegicus], regulator of G-protein signaling | |
| | | | | 18, regulator of G-protein signaling 2, regulator | |
| | | | | of G-protein signaling 8, regulator of G-protein | |
| | | | | signalling 13, regulator of G-protein signalling 2, | |
| | | | | 24 kD, regulator of G-protein signalling 8 | |
| 245 | 11403 | NM_053464 | | Human DNA sequence from clone RP5-157D4 | General |
| | | | | on chromosome 2 Contains a spermidine | |
| | | | | synthase (SPDSY) pseudogene, a CpG island, | |
| | | | | ESTs, STSs and GSSs, spermidine synthase | |
| 246 | 23276 | NM_053467 | | ESTs, Weakly similar to G1159 protein | General |
| | | | | trafficking protein tmp21-l [H. sapiens], ESTs, | |
| | | | | Weakly similar to P24_MOUSE COP-COATED | |
| | | | | VESICLE MEMBRANE PROTEIN P24 | |
| | | | | PRECURSOR (P24A) [M. musculus], RIKEN | |
| | | | | cDNA 1812N21 gene, RIKEN cDNA 243B6 | |
| | | | | gene, RIKEN cDNA 39341E15 gene, coated | |
| | | | | vesicle membrane protein, gp25L2 protein, | |
| | | | | transmembrane trafficking protein | |
| 247 | 15556 | NM_053483 | | ESTs, Weakly similar to A Chain A, Importin | General |
| | | | | Alpha, Mouse [M. musculus], expressed | |
| | | | | sequence AW146299, karyopherin (importin) | |
| | | | | alpha 2, karyopherin alpha 2 (RAG cohort 1, | |
| | | | | importin alpha 1) | |
| 248 | 16394 | NM_053485 | | EST, Moderately similar to CALCYCLIN | General |
| | | | | [R. norvegicus], S1 calcium-binding protein A6 | |
| | | | | (calcyclin), calcium binding protein A6 | |
| | | | | (calcyclin) | |
| 249 | 1886 | NM_053523 | | EST, Moderately similar to Y25_HUMAN | c |
| | | | | HYPOTHETICAL PROTEIN KIAA25 | |
| | | | | [H. sapiens], RIKEN cDNA 5314M7 gene, | |
| | | | | homocysteine-inducible, endoplasmic reticulum | |
| | | | | stress-inducible, ubiquitin-like domain member | |
| | | | | 1, hypothetical protein FLJ22313 | |
| 250 | 14380 | NM_053536 | Kruppel-like factor 15 | Kruppel-like factor 15, Kruppel-like factor 5, | General |
| | | | | Kruppel-like factor 9, TGFB inducible early | |
| | | | | growth response, basic transcription element | |
| | | | | binding protein 1 | |
| 251 | 15708 | NM_053565 | | | General |
| 252 | 3050 | NM_053582 | | ESTs, Highly similar to JC7189 tubulointerstitial | d, General |
| | | | | nephritis antigen [H. sapiens], P3ECSL, | |
| | | | | cathepsin B, lipocalin 7, tubulointerstitial | |
| | | | | nephritis antigen | |
| 252 | 3049 | NM_053582 | | ESTs, Highly similar to JC7189 tubulointerstitial | d, General |
| | | | | nephritis antigen [H. sapiens], P3ECSL, | |
| | | | | cathepsin B, lipocalin 7, tubulointerstitial | |
| | | | | nephritis antigen | |
| 253 | 21709 | NM_053596 | | KIAA64 gene product, endothelin converting | General |
| | | | | enzyme 1, endothelin converting enzyme-like 1, | |
| | | | | expressed sequence AW3225, expressed | |
| | | | | sequence BB127715, mel transforming | |
| | | | | oncogene-like 1, membrane metallo | |
| | | | | endopeptidase | |
| 254 | 2103 | NM_053597 | | 4S ribosomal protein S27 isoform, EST, Weakly | e, h |
| | | | | similar to RS27_HUMAN 4S RIBOSOMAL | |
| | | | | PROTEIN S27 [H. sapiens], ESTs, Moderately | |
| | | | | similar to RS27_HUMAN 4S RIBOSOMAL | |
| | | | | PROTEIN S27 [H. sapiens], RIKEN cDNA | |
| | | | | 18134D23 gene, RIKEN cDNA 321M24 gene, | |
| | | | | ribosomal protein S27 (metallopanstimulin 1) | |
| 255 | 7580 | NM_053603 | | EST X83352, ESTs, Highly similar to T17226 | General |
| | | | | hypothetical protein DKFZp566G223.1 | |
| | | | | [H. sapiens], ESTs, Weakly similar to S7484 | |
| | | | | RS43 protein - rat (fragment) [R. norvegicus], | |
| | | | | Homo sapiens, Similar to chloride intracellular | |
| | | | | channel 4, clone MGC: 8812 IMAGE: 3861372, | |
| | | | | mRNA, complete cds, RIKEN cDNA | |
| | | | | 573531E12 gene, chloride intracellular channel | |
| | | | | 1, chloride intracellular channel 2, chloride | |
| | | | | intracellular channel 4, chloride intracellular | |
| | | | | channel 4 (mitochondrial), intracellular chloride | |
| | | | | ion channel protein p64H1 | |
| 256 | 20243 | NM_053615 | casein kinase 1, alpha 1 | | h |
| 257 | 13005 | NM_053623 | fatty acid-Coenzyme A | | General |
| | | | ligase, long chain 4, fatty- | | |
| | | | acid-Coenzyme A ligase, | | |
| | | | long-chain 4 | | |
| 258 | 18644 | NM_053648 | beta-carotene 15, 15′- | EST, Moderately similar to 86162D protein COII | c |
| | | | dioxygenase, beta- | [M. musculus], EST, Weakly similar to 8124D | |
| | | | carotene 15, 15′- | cytochrome oxidase II [H. sapiens] | |
| | | | dioxygenase | | |
| 259 | 6684 | NM_053703 | | Mus musculus 12 days embryo head cDNA, | General |
| | | | | RIKEN full-length enriched library, clone: 32B1, | |
| | | | | full insert sequence, mitogen activated protein | |
| | | | | kinase kinase 5, mitogen activated protein | |
| | | | | kinase kinase 6, mitogen-activated protein | |
| | | | | kinase kinase 3, mitogen-activated protein | |
| | | | | kinase kinase 4, mitogen-activated protein | |
| | | | | kinase kinase 6 | |
| 260 | 25379 | NM_053713 | | | d, General |
| 260 | 22411 | NM_053713 | | ESTs, Moderately similar to CPBP RAT CORE | d |
| | | | | PROMOTER ELEMENT-BINDING PROTEIN | |
| | | | | [R. norvegicus], Kruppel-like factor 4 (gut), | |
| | | | | RIKEN cDNA 7427M5 gene, core promoter | |
| | | | | element binding protein | |
| 261 | 1218 | NM_053748 | | expressed sequence C86324, hypothetical | e, General |
| | | | | protein FLJ2359 | |
| 262 | 9059 | NM_053783 | | interferon gamma receptor, interferon gamma | g, General |
| | | | | receptor 1 | |
| 263 | 15103 | NM_053814 | | EST, Moderately similar to MYSO_HUMAN | h |
| | | | | MYOSIN HEAVY CHAIN, NONMUSCLE TYPE | |
| | | | | B [H. sapiens], EST, Weakly similar to T3868 | |
| | | | | RhoA-binding protein p116Rip - mouse | |
| | | | | [M. musculus], ESTs, Weakly similar to JC5421 | |
| | | | | smooth muscle myosin heavy chain 2 - mouse | |
| | | | | [M. musculus], Homo sapiens cDNA: FLJ23324 | |
| | | | | fis, clone HEP12482, highly similar to | |
| | | | | HUMMYOHCB Human nonmuscle myosin | |
| | | | | heavy chain-B (MYH1) mRNA, LIS1-interacting | |
| | | | | protein NUDE1, rat homolog, PiUS protein, | |
| | | | | RIKEN cDNA 177J1 gene, Rho interacting | |
| | | | | protein 3, cingulin, expressed sequence | |
| | | | | AI428493, expressed sequence AI647528, | |
| | | | | hypothetical protein FLJ13881 | |
| 264 | 15002 | NM_053819 | | EST, Moderately similar to TIM1 RAT | f, g, |
| | | | | METALLOPROTEINASE INHIBITOR 1 | General |
| | | | | PRECURSOR [R. norvegicus], EST, Weakly | |
| | | | | similar to TIM1 RAT METALLOPROTEINASE | |
| | | | | INHIBITOR 1 PRECURSOR [R. norvegicus], | |
| | | | | tissue inhibitor of metalloproteinase, tissue | |
| | | | | inhibitor of metalloproteinase 1 (erythroid | |
| | | | | potentiating activity, collagenase inhibitor) | |
| 264 | 15003 | NM_053819 | | EST, Moderately similar to TIM1 RAT | f, g, |
| | | | | METALLOPROTEINASE INHIBITOR 1 | General |
| | | | | PRECURSOR [R. norvegicus], EST, Weakly | |
| | | | | similar to TIM1 RAT METALLOPROTEINASE | |
| | | | | INHIBITOR 1 PRECURSOR [R. norvegicus], | |
| | | | | tissue inhibitor of metalloproteinase, tissue | |
| | | | | inhibitor of metalloproteinase 1 (erythroid | |
| | | | | potentiating activity, collagenase inhibitor) | |
| 265 | 17155 | NM_053835 | | | e |
| 266 | 20868 | NM_053843 | | | General |
| 266 | 20869 | NM_053843 | | | General |
| 267 | 1571 | NM_053857 | | EST, Moderately similar to 221415A initiation | d, General |
| | | | | factor 4E-binding protein: ISOTYPE, ESTs, | |
| | | | | Weakly similar to A55258 insulin-stimulated | |
| | | | | phosphoprotein PHAS-l - rat [R. norvegicus], | |
| | | | | RIKEN cDNA 1114O12 gene, eukaryotic | |
| | | | | translation initiation factor 4E binding protein 1, | |
| | | | | eukaryotic translation initiation factor 4E | |
| | | | | binding protein 2, eukaryotic translation | |
| | | | | initiation factor 4E binding protein 3 | |
| 268 | 18358 | NM_053864 | | EST, Highly similar to TERA HUMAN | h |
| | | | | [H. sapiens], EST, Weakly similar to T46437 | |
| | | | | hypothetical protein DKFZp434K126.1 | |
| | | | | [H. sapiens], ESTs, Weakly similar to T46437 | |
| | | | | hypothetical protein DKFZp434K126.1 | |
| | | | | [H. sapiens], ESTs, Weakly similar to TERA | |
| | | | | HUMAN [H. sapiens], ESTs, Weakly similar to | |
| | | | | TERA RAT TRANSITIONAL ENDOPLASMIC | |
| | | | | RETICULUM ATPASE [R. norvegicus], RIKEN | |
| | | | | cDNA 4833413G1 gene, RIKEN cDNA | |
| | | | | 543414H2 gene, spermatogenesis associated | |
| | | | | factor, valosin containing protein, valosin- | |
| | | | | containing protein | |
| 269 | 17728 | NM_053867 | | EST, Moderately similar to S659 IgE-dependent | a, b |
| | | | | histamine-releasing factor [H. sapiens], Homo | |
| | | | | sapiens mRNA full length insert cDNA clone | |
| | | | | EUROIMAGE 926491, hypothetical protein | |
| | | | | FLJ23, translationally regulated transcript (21 kDa), | |
| | | | | tumor protein, translationally-controlled 1 | |
| 270 | 19781 | NM_053883 | | ESTs, Moderately similar to DUS6 RAT DUAL | General |
| | | | | SPECIFICITY PROTEIN PHOSPHATASE 6 | |
| | | | | [R. norvegicus], ESTs, Weakly similar to DUS6 | |
| | | | | RAT DUAL SPECIFICITY PROTEIN | |
| | | | | PHOSPHATASE 6 [R. norvegicus], dual | |
| | | | | specificity phosphatase 1, dual specificity | |
| | | | | phosphatase 13, dual specificity phosphatase | |
| | | | | 14, dual specificity phosphatase 6, dual | |
| | | | | specificity phosphatase 9, expressed sequence | |
| | | | | BB14621, mitogen-activated protein kinase | |
| | | | | phosphatase x, protein tyrosine phosphatase, | |
| | | | | non-receptor type 16 | |
| 271 | 385 | NM_053885 | | | i, General |
| 272 | 1288 | NM_053949 | | EST, Weakly similar to I38465 probable | General |
| | | | | potassium channel subunit [H. sapiens], | |
| | | | | potassium voltage-gated channel, subfamily H | |
| | | | | (eag-related), member 5 | |
| 273 | 19774 | NM_053961 | | | a |
| 274 | 16546 | NM_053965 | | ESTs, Weakly similar to MCAT RAT | General |
| | | | | MITOCHONDRIAL | |
| | | | | CARNITINE/ACYLCARNITINE CARRIER | |
| | | | | PROTEIN [R. norvegicus], ESTs, Weakly similar | |
| | | | | to MCAT_HUMAN MITOCHONDRIAL | |
| | | | | CARNITINE/ACYLCARNITINE CARRIER | |
| | | | | PROTEIN [H. sapiens], expressed sequence | |
| | | | | W51672, solute carrier family 25 | |
| | | | | (carnitine/acylcarnitine translocase), member 2, | |
| | | | | solute carrier family 25 (mitochondrial | |
| | | | | carnitine/acylcarnitine translocase), member 2 | |
| 275 | 19544 | NM_053982 | | EST, Highly similar to 4S RIBOSOMAL | General |
| | | | | PROTEIN S15A [R. norvegicus], ESTs, | |
| | | | | Moderately similar to S2251 ribosomal protein | |
| | | | | S15a.e [H. sapiens], ribosomal protein S15a | |
| 276 | 15642 | NM_053985 | | ESTs, Highly similar to HISTONE H3.3 | General |
| | | | | [R. norvegicus], H3 histone, family 3A, H3 | |
| | | | | histone, family 3B, H3 histone, family 3B | |
| | | | | (H3.3B) | |
| 277 | 17739 | NM_053995 | | | e |
| 278 | 17329 | NM_054008 | | RGC32 protein, RIKEN cDNA 1192H23 gene | General |
| 279 | 19658 | NM_057103 | A kinase (PRKA) anchor | | General |
| | | | protein (gravin) 12 | | |
| 280 | 968 | NM_057133 | | | h |
| 281 | 2413 | NM_057141 | | ESTs, Weakly similar to ROK_HUMAN | e, h |
| | | | | HETEROGENEOUS NUCLEAR | |
| | | | | RIBONUCLEOPROTEIN K [R. norvegicus], | |
| | | | | heterogeneous nuclear ribonucleoprotein K, | |
| | | | | poly(rC)-binding protein 4 | |
| 281 | 2416 | NM_057141 | | ESTs, Weakly similar to ROK_HUMAN | d |
| | | | | HETEROGENEOUS NUCLEAR | |
| | | | | RIBONUCLEOPROTEIN K [R. norvegicus], | |
| | | | | heterogeneous nuclear ribonucleoprotein K, | |
| | | | | poly(rC)-binding protein 4 | |
| 282 | 1892 | NM_057144 | | cysteine and glycine-rich protein 3 (cardiac LIM | g, i, |
| | | | | protein), cysteine rich protein, cysteine-rich | General |
| | | | | protein 2, cysteine-rich protein 3, thymus LIM | |
| | | | | protein | |
| 283 | 17477 | NM_057194 | | EST, Weakly similar to B36298 proline-rich | g, General |
| | | | | protein PRB3S [H. sapiens], EST, Weakly | |
| | | | | similar to CGHU3B collagen alpha 3(IV) chain | |
| | | | | precursor, long splice form [H. sapiens], EST, | |
| | | | | Weakly similar to D475 proline-rich protein | |
| | | | | PRB1/2S [H. sapiens], EST, Weakly similar to | |
| | | | | JE284 Mm-1 cell derived transplantability- | |
| | | | | associated protein 1b [H. sapiens], galectin- | |
| | | | | related inter-fiber protein, murine leukemia viral | |
| | | | | (bmi-1) oncogene homolog, phospholipid | |
| | | | | scramblase 1, phospholipid scramblase 2, | |
| | | | | phospholipid scramblase 3 | |
| 284 | 14126 | NM_057208 | | | g |
| 285 | 8641 | NM_057211 | | BTE-binding protein 4, ESTs, Weakly similar to | c |
| | | | | ZN42_HUMAN ZINC FINGER PROTEIN 42 | |
| | | | | (MYELOID ZINC FINGER 1) (MZF-1) | |
| | | | | [H. sapiens], Kruppel-like factor 13, Kruppel-like | |
| | | | | factor 15 (kidney), Kruppel-like factor 9, TGFB | |
| | | | | inducible early growth response, basic | |
| | | | | transcription element binding protein 1, | |
| | | | | expressed sequence AI843742 | |
| 286 | 10498 | NM_078617 | | EST, Moderately similar to RS23_HUMAN 4S | e, f |
| | | | | RIBOSOMAL PROTEIN S2 [R. norvegicus], | |
| | | | | EST, Weakly similar to RS23_HUMAN 4S | |
| | | | | RIBOSOMAL PROTEIN S2 [R. norvegicus], | |
| | | | | ESTs, Weakly similar to RS23_HUMAN 4S | |
| | | | | RIBOSOMAL PROTEIN S2 [R. norvegicus], | |
| | | | | Mus musculus, Similar to mitochondrial | |
| | | | | ribosomal protein S12, clone MGC: 13892 | |
| | | | | IMAGE: 429358, mRNA, complete cds, RIKEN | |
| | | | | cDNA 24144J15 gene, expressed sequence | |
| | | | | AI327385, mitochondrial ribosomal protein S12, | |
| | | | | ribosomal protein S23 | |
| 287 | 20392 | NM_080477 | | | General |
| 288 | 23033 | NM_080888 | | BCL2/adenovirus E1B 19 kDa-interacting | b, General |
| | | | | protein 3-like, BCL2/adenovirus E1B 19 kD- | |
| | | | | interacting protein 3-like | |
| 289 | 15843 | NM_080910 | | ESTs, Moderately similar to PUR6_HUMAN | h |
| | | | | MULTIFUNCTIONAL PROTEIN ADE2 | |
| | | | | [H. sapiens], RIKEN cDNA 261511I9 gene, | |
| | | | | multifunctional polypeptide similar to SAICAR | |
| | | | | synthetase and AIR carboxylase | |
| 290 | 21391 | NM_130416 | | ESTs, Highly similar to LUHU7 annexin VII, | General |
| | | | | long form [H. sapiens], ESTs, Moderately similar | |
| | | | | to ANX4 MOUSE ANNEXIN IV [M. musculus], | |
| | | | | ZAP 36/annexin IV, annexin A4, annexin A7 | |
| 291 | 25094 | X77117 | | | c |
| 292 | 11663 | AA800803 | | | General |
| 293 | 25717 | X61296 | | | i |
| 294 | 5292 | AI171607 | | | d, General |
| 295 | 23998 | AI230578 | | | General |
| 296 | 5186 | AA925674 | | | d, General |
| 297 | 1754 | AA817837 | | potassium channel, subfamily K, member 1 | General |
| | | | | (TWIK-1), potassium channel, subfamily K, | |
| | | | | member 3 (TASK-1), potassium channel, | |
| | | | | subfamily K, member 6 (TWIK-2), potassium | |
| | | | | channel, subfamily K, member 7 | |
| 298 | 6438 | AA819269 | | | General |
| 299 | 6059 | AI178245 | | ESTs, Highly similar to T13963 formin related | b, General |
| | | | | protein, lymphocyte specific - mouse | |
| | | | | [M. musculus], ESTs, Moderately similar to | |
| | | | | T13963 formin related protein, lymphocyte | |
| | | | | specific - mouse [M. musculus], Homo sapiens | |
| | | | | mRNA; cDNA DKFZp762B245 (from clone | |
| | | | | DKFZp762B245); partial cds, KIAA192 protein, | |
| | | | | formin-like | |
| 300 | 18663 | U95052 | | eukaryotic translation initiation factor 4 gamma, 3 | h |
| 301 | 7414 | AI137586 | | EST, Weakly similar to IMB3_HUMAN | g, General |
| | | | | IMPORTIN BETA-3 SUBUNIT [H. sapiens], | |
| | | | | Homo sapiens cDNA FLJ12978 fis, clone | |
| | | | | NT2RP26321, RAN binding protein 6, | |
| | | | | karyopherin (importin) beta 3 | |
| 302 | 10019 | AI178756 | | | d, h |
| 303 | 6226 | AA818521 | | | General |
| 304 | 15571 | M27207 | collagen, type I, alpha 1, | EST, Highly similar to CA1B_HUMAN | e, h |
| | | | procollagen, type I alpha 1 | COLLAGEN ALPHA 1(XI) CHAIN | |
| | | | | PRECURSOR [H. sapiens], EST, Weakly | |
| | | | | similar to CA11_HUMAN COLLAGEN ALPHA | |
| | | | | 1(I) CHAIN PRECURSOR [H. sapiens], EST, | |
| | | | | Weakly similar to CA25_HUMAN COLLAGEN | |
| | | | | ALPHA 2(V) CHAIN PRECURSO [H. sapiens], | |
| | | | | EST, Weakly similar to CGHU1S collagen | |
| | | | | alpha 1(I) chain precursor [H. sapiens], ESTs, | |
| | | | | Weakly similar to CA11_HUMAN COLLAGEN | |
| | | | | ALPHA 1(I) CHAIN PRECURSOR [H. sapiens], | |
| | | | | Homo sapiens cDNA FLJ2845 fis, clone | |
| | | | | ADKA191, Homo sapiens mRNA for putative | |
| | | | | emu2 protein, collagen, type I, alpha 1 | |
| 305 | 15089 | AI009752 | | | g |
| 306 | 17214 | AI639008 | | | a |
| 307 | 6073 | AA818818 | | | a |
| 308 | 17781 | AI175474 | | | a |
| 309 | 22386 | AA800844 | | ESTs, Weakly similar to PROTEIN-LYSINE 6- | e |
| | | | | OXIDASE PRECURSOR [R. norvegicus], Lysyl | |
| | | | | oxidase, lysyl oxidase, lysyl oxidase-like, lysyl | |
| | | | | oxidase-like 1, lysyl oxidase-like 2 | |
| 310 | 24765 | AA900050 | | EST, Moderately similar to 6S RIBOSOMAL | h |
| | | | | PROTEIN L37A [R. norvegicus], EST, | |
| | | | | Moderately similar to JN875 ribosomal protein | |
| | | | | L37a [H. sapiens], EST, Weakly similar to 6S | |
| | | | | RIBOSOMAL PROTEIN L37A [R. norvegicus], | |
| | | | | EST, Weakly similar to JN875 ribosomal | |
| | | | | protein L37a [H. sapiens], ESTs, Weakly similar | |
| | | | | to 6S RIBOSOMAL PROTEIN L37A | |
| | | | | [R. norvegicus], ESTs, Weakly similar to JN875 | |
| | | | | ribosomal protein L37a [H. sapiens], RIKEN | |
| | | | | cDNA 28125M15 gene, ribosomal protein L37a | |
| 311 | 20984 | D90109 | fatty acid Coenzyme A | ESTs, Weakly similar to LCFB MOUSE LONG- | h |
| | | | ligase, long chain 2, fatty- | CHAIN-FATTY-ACID-COA LIGASE 2 | |
| | | | acid-Coenzyme A ligase, | [M. musculus], Mus musculus, Similar to fatty- | |
| | | | long-chain 2 | acid-Coenzyme A ligase, long-chain 6, clone | |
| | | | | MGC: 28744 IMAGE: 4481949, mRNA, complete | |
| | | | | cds, Rattus norvegicus gonadotropin-regulated | |
| | | | | long chain acyl-CoA synthetase (GR-LACS) | |
| | | | | mRNA, complete cds, fatty acid Coenzyme A | |
| | | | | ligase, long chain 2, fatty acid Coenzyme A | |
| | | | | ligase, long chain 5, fatty-acid-Coenzyme A | |
| | | | | ligase, long-chain 1, fatty-acid-Coenzyme A | |
| | | | | ligase, long-chain 2, lipidosin | |
| 312 | 22873 | AA923945 | | RIKEN cDNA 24142F5 gene, procollagen- | i, General |
| | | | | lysine, 2-oxoglutarate 5-dioxygenase (lysine | |
| | | | | hydroxylase) 2, procollagen-lysine, 2- | |
| | | | | oxoglutarate 5-dioxygenase (lysine | |
| | | | | hydroxylase, Ehlers-Danlos syndrome type VI), | |
| | | | | procollagen-lysine, 2-oxoglutarate 5- | |
| | | | | dioxygenase 1 | |
| 313 | 2341 | AI012144 | | | a, General |
| 314 | 4861 | AA901290 | | | General |
| 315 | 22796 | AI072213 | | | General |
| 316 | 15935 | AA866345 | | | General |
| 317 | 16038 | AI177372 | | GABA(A) receptor-associated protein, GABA(A) | h |
| | | | | receptor-associated protein like 1, GABA(A) | |
| | | | | receptor-associated protein-like 2, GABA(A) | |
| | | | | receptors associated protein like 3, RIKEN | |
| | | | | cDNA 111H21 gene, RIKEN cDNA 492251H4 | |
| | | | | gene, microtubule-associated protein 1 light | |
| | | | | chain 3, microtubule-associated proteins 1A/1B | |
| | | | | light chain 3 | |
| 318 | 15212 | AI229753 | | ADP-ribosylation factor 1, ADP-ribosylation | d, General |
| | | | | factor 2, ARF protein, Homo sapiens PRO2667 | |
| | | | | mRNA, complete cds, RIKEN cDNA 2318D22 | |
| | | | | gene, expressed sequence T25534 | |
| 319 | 23157 | AI172489 | | ESTs, Highly similar to STRI RAT STRIATIN | a |
| | | | | [R. norvegicus], ESTs, Weakly similar to STRI | |
| | | | | RAT STRIATIN [R. norvegicus], Mus musculus, | |
| | | | | Similar to RIKEN cDNA 1541N16 gene, clone | |
| | | | | MGC: 1266 IMAGE: 378188, mRNA, complete | |
| | | | | cds, RIKEN cDNA 2514D7 gene, expressed | |
| | | | | sequence AA48785, nuclear autoantigen, | |
| | | | | platelet-activating factor acetylhydrolase, | |
| | | | | isoform 1b, beta1 subunit, striatin, striatin, | |
| | | | | calmodulin-binding protein, zinedin | |
| 320 | 4710 | AI168973 | | EST, Moderately similar to PHLP_HUMAN | General |
| | | | | PHOSDUCIN-LIKE PROTEIN [H. sapiens], | |
| | | | | RIKEN cDNA 11161A19 gene, RIKEN cDNA | |
| | | | | 1211E13 gene, hypothetical protein MGC362, | |
| | | | | phosducin-like, phosducin-like 2, phosducin-like | |
| | | | | protein, rod photoreceptor 1 | |
| 321 | 22697 | AA945996 | | | b, General |
| 322 | 15892 | AI179988 | | | a, General |
| 323 | 11404 | AI237002 | | Human DNA sequence from clone RP5-157D4 | g, General |
| | | | | on chromosome 2 Contains a spermidine | |
| | | | | synthase (SPDSY) pseudogene, a CpG island, | |
| | | | | ESTs, STSs and GSSs, spermidine synthase | |
| 324 | 23596 | AI105435 | | expressed sequence D17825, glutaryl- | c, General |
| | | | | Coenzyme A dehydrogenase | |
| 325 | 15841 | AI103465 | | POP4 (processing of precursor, S. cerevisiae) | d, g, |
| | | | | homolog | General |
| 326 | 7220 | AI013098 | | | d |
| 327 | 20647 | AI639402 | | | b |
| 328 | 10829 | AI044467 | | | c, f |
| 329 | 22043 | AA943738 | | | f |
| 330 | 2936 | AI229843 | | | General |
| 331 | 26133 | AI009950 | | | e |
| 332 | 5867 | AA858953 | | asparaginyl-tRNA synthetase, hypothetical | Geneal |
| | | | | protein FLJ23441 | |
| 333 | 3278 | AI008988 | | ESTs, Highly similar to 117276A gene bcr | General |
| | | | | [H. sapiens], ESTs, Highly similar to N- | |
| | | | | CHIMAERIN [R. norvegicus], RIKEN cDNA | |
| | | | | 17112L9 gene, RIKEN cDNA 51334C9 gene, | |
| | | | | RIKEN cDNA 57343H17 gene, SH3-domain | |
| | | | | binding protein 1, breakpoint cluster region, | |
| | | | | chimerin (chimaerin) 1, expressed sequence | |
| | | | | AI84366, expressed sequence AU42359, | |
| | | | | hypothetical protein DKFZp434K191 | |
| 334 | 21101 | AI175789 | | Actin, alpha, cardiac, ESTs, Highly similar to | g |
| | | | | ACTC_HUMAN ACTIN, ALPHA CARDIA | |
| | | | | [R. norvegicus], ESTs, Weakly similar to | |
| | | | | ACTA_HUMAN ACTIN, AORTIC SMOOTH | |
| | | | | MUSCLE [R. norvegicus], Homo sapiens cDNA: | |
| | | | | FLJ21441 fis, clone COL4422, actin, alpha 2, | |
| | | | | smooth muscle, aorta, actin, alpha, cardiac, | |
| | | | | actin, alpha, cardiac muscle | |
| 335 | 12613 | H31620 | | Homo sapiens cDNA FLJ13436 fis, clone | General |
| | | | | PLACE12598, weakly similar to | |
| | | | | OLIGORIBONUCLEASE (EC 3.1.—.—), small | |
| | | | | fragment nuclease | |
| 336 | 6927 | AI010542 | | | h |
| 337 | 8789 | AI070073 | | | h |
| 338 | 22995 | AI232047 | | | General |
| 339 | 5129 | AA925335 | | | d |
| 340 | 12462 | AI175421 | | | General |
| 341 | 1760 | U25281 | | EST, Weakly similar to G3PT MOUSE | General |
| | | | | GLYCERALDEHYDE 3-PHOSPHATE | |
| | | | | DEHYDROGENASE, TESTIS-SPECIFIC | |
| | | | | [M. musculus], ESTs, Moderately similar to | |
| | | | | WASP-family protein [H. sapiens], ESTs, | |
| | | | | Weakly similar to Y269_HUMAN | |
| | | | | HYPOTHETICAL PROLINE-RICH PROTEIN | |
| | | | | KIAA269 [H. sapiens], ESTs, Weakly similar to | |
| | | | | p14mDia [M. musculus], ESTs, Weakly similar | |
| | | | | to similar to CR16, SH3 domain binding protein | |
| | | | | [H. sapiens], expressed sequence AI842788 | |
| 342 | 24521 | AA945636 | | EST, Weakly similar to R6HUP1 acidic | e |
| | | | | ribosomal protein P1, cytosolic [H. sapiens], | |
| | | | | ESTs, Highly similar to R6HUP1 acidic | |
| | | | | ribosomal protein P1, cytosolic [H. sapiens], | |
| | | | | RIKEN cDNA 2749I22 gene, ribosomal protein, | |
| | | | | large, P1 | |
| 343 | 25354 | L13025 | | | e |
| 344 | 24272 | AA955948 | | Homo sapiens DNA from chromosome 19p13.2 | General |
| | | | | cosmids R3124, R3272 and R28549 containing | |
| | | | | the EKLF, GCDH, CRTC, and RAD23A genes, | |
| | | | | genomic sequence, deoxyribonuclease DLAD, | |
| | | | | deoxyribonuclease II alpha, deoxyribonuclease | |
| | | | | II beta, deoxyribonuclease II, lysosomal, | |
| | | | | expressed sequence AI526873 | |
| 345 | 18160 | AA799448 | | | h |
| 346 | 11738 | AI104213 | | | General |
| 347 | 15644 | AI010256 | | ESTs, Highly similar to HISTONE H3.3 | General |
| | | | | [R. norvegicus], H3 histone, family 3A, H3 | |
| | | | | histone, family 3B, H3 histone, family 3B | |
| | | | | (H3.3B) | |
| 348 | 10971 | AI073212 | | | e |
| 349 | 23578 | AA955042 | | folate receptor 2 (fetal) | General |
| 350 | 6217 | AI230381 | | | General |
| 351 | 21514 | AA851660 | | | General |
| 352 | 16909 | AA942704 | | EST, Weakly similar to SUR2_HUMAN | e |
| | | | | SURFEIT LOCUS PROTEIN 2 [H. sapiens], | |
| | | | | surfeit 2, surfeit gene 2 | |
| 353 | 21284 | AI170842 | | ESTs, Highly similar to A57291 cytokine | General |
| | | | | inducible nuclear protein C193 [H. sapiens], | |
| | | | | ESTs, Weakly similar to A57291 cytokine | |
| | | | | inducible nuclear protein C193 [H. sapiens], | |
| | | | | ankyrin repeat domain 2 (stretch responsive | |
| | | | | muscle), cardiac ankyrin repeat protein | |
| 354 | 23645 | AI144653 | | | General |
| 355 | 8230 | AI059117 | | | General |
| 356 | 9720 | AI071727 | | | g |
| 357 | 24012 | AA957335 | | | a, i |
| 358 | 14737 | AI008416 | | | g, General |
| 359 | 7308 | AA818407 | | | b, General |
| 360 | 6102 | AI228335 | | | General |
| 361 | 19728 | AI170394 | | | c |
| 362 | 6568 | AA817891 | | | General |
| 363 | 20891 | AI169337 | | hypothetical protein | General |
| 364 | 11375 | AI237594 | | makorin, ring finger protein, 1, makorin, ring | b, General |
| | | | | finger protein, 2, makorin, ring finger protein, 3, | |
| | | | | makorin, ring finger protein, 4 | |
| 365 | 1483 | U34843 | | | i |
| 366 | 20684 | H32977 | | | General |
| 367 | 3959 | AA901338 | | | g, General |
| 368 | 19518 | AA800817 | | | a |
| 369 | 22445 | AA944530 | | PL6 protein | f |
| 370 | 16312 | AA875032 | | | c, General |
| 371 | 19255 | M15562 | | expressed sequence AI323765, | b, General |
| | | | | histocompatibility 2, class II antigen E alpha, | |
| | | | | major histocompatibility complex, class II, DP | |
| | | | | alpha 2 (pseudogene), major histocompatibility | |
| | | | | complex, class II, DR alpha | |
| 372 | 4048 | AA851814 | | EST, Moderately similar to PM17 MOUSE | General |
| | | | | MELANOCYTE PROTEIN PMEL 17 | |
| | | | | PRECURSOR [M. musculus], Homo sapiens, | |
| | | | | Similar to glycoprotein (transmembrane) nmb, | |
| | | | | clone MGC: 1696 IMAGE: 3345861, mRNA, | |
| | | | | complete cds, glycoprotein (transmembrane) | |
| | | | | nmb, silver | |
| 373 | 7471 | AI012379 | | | General |
| 374 | 21351 | AA945932 | | annexin A1, annexin A3 | d, General |
| 375 | 23963 | AA957139 | | | General |
| 376 | 9658 | AA943748 | | | d, General |
| 377 | 14384 | AI177096 | | EST, Moderately similar to APT RAT ADENINE | c |
| | | | | PHOSPHORIBOSYLTRANSFERASE | |
| | | | | [R. norvegicus], Mouse adenine | |
| | | | | phosphoribosyltransferase (APRT), complete | |
| | | | | cds, adenine phosphoribosyl transferase, | |
| | | | | adenine phosphoribosyltransferase, expressed | |
| | | | | sequence C85684 | |
| 378 | 5531 | AI145859 | | | d |
| 379 | 3324 | AA997981 | | | e |
| 380 | 13083 | H31665 | | | d |
| 381 | 18400 | AA799991 | | | a, f, |
| | | | | | General |
| 382 | 15281 | D13623 | | | General |
| 383 | 22578 | AA924105 | | Macrophage inflammatory protein 1 alpha | g |
| | | | | (Small inducible cytokine A3), small inducible | |
| | | | | cytokine A3, small inducible cytokine A3 | |
| | | | | (homologous to mouse Mip-1a), small inducible | |
| | | | | cytokine A3-like 1, small inducible cytokine A6, | |
| | | | | small inducible cytokine subfamily A (Cys-Cys), | |
| | | | | member 23 | |
| 384 | 12752 | AI012146 | | | General |
| 385 | 6606 | AI012308 | | | f, g, |
| | | | | | General |
| 386 | 11936 | AI228030 | | EST, Weakly similar to SP18_HUMAN SIN3 | h |
| | | | | ASSOCIATED POLYPEPTIDE P18 | |
| | | | | [H. sapiens], Sin3-associated polypeptide 18, | |
| | | | | sin3-associated polypeptide, l8 kD | |
| 387 | 2539 | AI111960 | | | General |
| 388 | 6353 | AI008442 | | EST, Weakly similar to JC5111 cyclin- | f |
| | | | | dependent kinase-related protein 1b - rat | |
| | | | | [R. norvegicus], EST, Weakly similar to S1889 | |
| | | | | proline-rich protein [H. sapiens], ESTs, Highly | |
| | | | | similar to JC5111 cyclin-dependent kinase- | |
| | | | | related protein 1b - rat [R. norvegicus], Homo | |
| | | | | sapiens ALS2CR7 mRNA, complete cds, | |
| | | | | PCTAIRE protein kinase 1, PCTAIRE-motif | |
| | | | | protein kinase 1, PFTAIRE protein kinase 1 | |
| 389 | 15786 | AI013924 | | | General |
| 390 | 16596 | AI102486 | | DNA segment, Chr 7, ERATO Doi 486, | General |
| | | | | expressed, EST, Weakly similar to S37583 | |
| | | | | RING finger protein rfp - mouse [M. musculus], | |
| | | | | expressed sequence AI894158, expressed | |
| | | | | sequence AW46487, hypothetical gene | |
| | | | | MGC1127 | |
| 391 | 18581 | AI176160 | | | General |
| 392 | 4948 | AA924428 | | | h |
| 393 | 12098 | AI237075 | | | d |
| 394 | 20073 | AI639152 | | | b, General |
| 395 | 18456 | D00688 | monoamine oxidase A | EST, Highly similar to AOFA_HUMAN AMINE | General |
| | | | | OXIDASE [H. sapiens], ESTs, Weakly similar to | |
| | | | | JH817 amine oxidase [H. sapiens], Homo | |
| | | | | sapiens interleukin-4 induced gene-1 protein | |
| | | | | (FIG. 1) mRNA, complete cds, KIAA61 protein, | |
| | | | | monoamine oxidase A | |
| 396 | 11208 | AI237586 | | EST, Weakly similar to JC1241 beta-interferon- | General |
| | | | | induced protein - rat [R. norvegicus], ESTs, | |
| | | | | Moderately similar to JC1241 beta-interferon- | |
| | | | | induced protein - rat [R. norvegicus], RIKEN | |
| | | | | cDNA 11136C17 gene, RIKEN cDNA | |
| | | | | 4933438K12 gene, interferon induced | |
| | | | | transmembrane protein 2 (1-8D) | |
| 397 | 8314 | AI059386 | | | General |
| 398 | 1893 | X51529 | phospholipase A2, group | | General |
| | | | IIA (platelets, synovial | | |
| | | | fluid) | | |
| 399 | 10821 | AI043999 | | | e |
| 400 | 20983 | AI044900 | fatty acid Coenzyme A | ESTs, Weakly similar to LCFB MOUSE LONG- | General |
| | | | ligase, long chain 2, fatty- | CHAIN-FATTY-ACID--COA LIGASE 2 | |
| | | | acid-Coenzyme A ligase, | [M. musculus], Mus musculus, Similar to fatty- | |
| | | | long-chain 2 | acid-Coenzyme A ligase, long-chain 6, clone | |
| | | | | MGC: 28744 IMAGE: 4481949, mRNA, complete | |
| | | | | cds, Rattus norvegicus gonadotropin-regulated | |
| | | | | long chain acyl-CoA synthetase (GR-LACS) | |
| | | | | mRNA, complete cds, fatty acid Coenzyme A | |
| | | | | ligase, long chain 2, fatty acid Coenzyme A | |
| | | | | ligase, long chain 5, fatty-acid-Coenzyme A | |
| | | | | ligase, long-chain 1, fatty-acid-Coenzyme A | |
| | | | | ligase, long-chain 2, lipidosin | |
| 401 | 18472 | AI168975 | | | General |
| 402 | 21592 | AI102065 | | heme-binding protein | General |
| 403 | 8665 | AI071965 | | ESTs, Highly similar to T17342 hypothetical | General |
| | | | | protein DKFZp586K1924.1 [H. sapiens], ESTs, | |
| | | | | Moderately similar to T17342 hypothetical | |
| | | | | protein DKFZp586K1924.1 [H. sapiens] | |
| 404 | 11066 | AI071602 | | | h |
| 405 | 19452 | AA964500 | | | e, f |
| 406 | 6509 | AI232361 | | | General |
| 407 | 22266 | AA945601 | | | a |
| 408 | 2742 | AI070173 | | | g, i, |
| | | | | | General |
| 409 | 244 | U38376 | | ESTs, Highly similar to FGD1_HUMAN | General |
| | | | | PUTATIVE RHO/RAC GUANINE | |
| | | | | NUCLEOTIDE EXCHANGE FACTOR | |
| | | | | [H. sapiens], ESTs, Weakly similar to B39898 | |
| | | | | phospholipase A2 [M. musculus], ESTs, Weakly | |
| | | | | similar to FGD1 MOUSE PUTATIVE RHO/RAC | |
| | | | | GUANINE NUCLEOTIDE EXCHANGE | |
| | | | | FACTOR [M. musculus], ESTs, Weakly similar | |
| | | | | to FGD1_HUMAN PUTATIVE RHO/RAC | |
| | | | | GUANINE NUCLEOTIDE EXCHANGE | |
| | | | | FACTOR [H. sapiens], FGD1 family, member 3, | |
| | | | | RIKEN cDNA 583461L1 gene, faciogenital | |
| | | | | dysplasia (Aarskog-Scott syndrome), | |
| | | | | faciogenital dysplasia homolog, faciogenital | |
| | | | | dysplasia homolog 2 (human) | |
| 410 | 4238 | AI234816 | | KIAA13 gene product | b |
| 411 | 9970 | AI045198 | | | General |
| 412 | 6550 | AA817947 | | | h |
| 413 | 5193 | AA925693 | | | General |
| 414 | 22175 | AA818999 | | | General |
| 415 | 16538 | AA799449 | | ESTs, Moderately similar to NPL4_HUMAN | h |
| | | | | NUCLEOSOME ASSEMBLY PROTEIN 1-LIKE | |
| | | | | 4 [H. sapiens], ESTs, Weakly similar to | |
| | | | | NPL4_HUMAN NUCLEOSOME ASSEMBLY | |
| | | | | PROTEIN 1-LIKE 4 [H. sapiens], SET | |
| | | | | translocation, nucleosome assembly protein 1- | |
| | | | | like 1, nucleosome assembly protein 1-like 4 | |
| 416 | 1830 | AI009002 | | cell division cycle 25 homolog B (S. cerevisiae), | a, b |
| | | | | cell division cycle 25 homolog C (S. cerevisiae), | |
| | | | | cell division cycle 25B, cell division cycle 25C, | |
| | | | | expressed sequence AI64853 | |
| 417 | 17485 | AI012352 | | | General |
| 418 | 3982 | AI175100 | | | General |
| 419 | 3965 | AI112118 | | | General |
| 420 | 5969 | AI102520 | | ESTs, Weakly similar to GEF2_HUMAN | c, General |
| | | | | GANGLIOSIDE EXPRESSION FACTOR 2 | |
| | | | | [R. norvegicus], GABA(A) receptor-associated | |
| | | | | protein-like 2, RIKEN cDNA 6112F2 gene, | |
| | | | | gamma-aminobutyric acid (GABA(A)) receptor- | |
| | | | | associated protein-like 1, ganglioside | |
| | | | | expression factor 2 | |
| 421 | 15088 | AI232613 | | | General |
| 422 | 25691 | X53504 | | | e |
| 423 | 2984 | AA997015 | | | General |
| 424 | 11708 | AI171807 | | | General |
| 425 | 23187 | AI144591 | | | General |
| 426 | 16818 | AI072906 | | | a |
| 427 | 19298 | AI236338 | | ESTs, Highly similar to NHPX RAT NHP2/RS6 | General |
| | | | | FAMILY PROTEIN YEL26W HOMOLOG | |
| | | | | [R. norvegicus], RIKEN cDNA 24113M7 gene, | |
| | | | | non-histone chromosome protein 2 (S. | |
| | | | | cerevisiae)-like 1, nucleolar protein family A, | |
| | | | | member 2 (H/ACA small nucleolar RNPs), | |
| | | | | sperm specific antigen 1 | |
| 428 | 14345 | AA944773 | | DKFZP586L724 protein, Homo sapiens cDNA: | e |
| | | | | FLJ21737 fis, clone COLF3396 | |
| 429 | 10109 | X58465 | ribosomal protein S5 | EST, Moderately similar to 4S RIBOSOMAL | e |
| | | | | PROTEIN S5 [R. norvegicus], ESTs, Weakly | |
| | | | | similar to S55916 ribosomal protein S5, | |
| | | | | cytosolic [H. sapiens], ribosomal protein S5 | |
| 430 | 5596 | AI044747 | | | e, General |
| 431 | 14989 | AI177366 | | ESTs, Highly similar to B2779 fibronectin | f, i, |
| | | | | receptor beta chain precursor [H. sapiens], | General |
| | | | | integrin beta 1 (fibronectin receptor beta), | |
| | | | | integrin beta 2, integrin, beta 1 (fibronectin | |
| | | | | receptor, beta polypeptide, antigen CD29 | |
| | | | | includes MDF2, MSK12), integrin, beta 2 | |
| | | | | (antigen CD18 (p95), lymphocyte function- | |
| | | | | associated antigen 1; macrophage antigen 1 | |
| | | | | (mac-1) beta subunit) | |
| 432 | 17320 | AI178069 | | | General |
| 433 | 13646 | X62166 | | EST, Weakly similar to 6S RIBOSOMAL | General |
| | | | | PROTEIN L3 [R. norvegicus], EST, Weakly | |
| | | | | similar to I8451 ribosomal protein L3 | |
| | | | | [H. sapiens], ESTs, Moderately similar to 6S | |
| | | | | RIBOSOMAL PROTEIN L3 [R. norvegicus], | |
| | | | | ESTs, Moderately similar to I8451 ribosomal | |
| | | | | protein L3 [H. sapiens], ESTs, Weakly similar to | |
| | | | | RL3 MOUSE 6S RIBOSOMAL PROTEIN L3 | |
| | | | | [M. musculus], RIKEN cDNA 11157H16 gene, | |
| | | | | ribosomal protein L3, ribosomal protein L3-like | |
| 434 | 18611 | X58200 | ribosomal protein L29 | EST, Moderately similar to 6S RIBOSOMAL | e, General |
| | | | | PROTEIN L29 [R. norvegicus], EST, Weakly | |
| | | | | similar to S65784 ribosomal protein L29, | |
| | | | | cytosolic [H. sapiens], ESTs, Highly similar to | |
| | | | | S65784 ribosomal protein L29, cytosolic | |
| | | | | [H. sapiens], ESTs, Weakly similar to 6S | |
| | | | | RIBOSOMAL PROTEIN L29 [M. musculus], | |
| | | | | Human DNA sequence from clone RP4-595K12 | |
| | | | | on chromosome 1p31.2-31.3 Contains a | |
| | | | | pseudogene similar to 6S RPL29 (ribosomal | |
| | | | | protein L29 (cell surface heparin binding protein | |
| | | | | HIP)), a chromosome 1 specific mRNA | |
| | | | | (KIAA499), a novel mRNA (KIAA433), ESTs, | |
| | | | | STSs, GSSs and a CpG Island, ribosomal | |
| | | | | protein L29 | |
| 435 | 21671 | AA900295 | | placental growth factor, placental growth factor, | General |
| | | | | vascular endothelial growth factor-related | |
| | | | | protein | |
| 436 | 9452 | AA955206 | | | General |
| 437 | 20901 | AA942706 | | | d |
| 438 | 21985 | AA943273 | | | a |
| 439 | 7168 | AI012739 | | | General |
| 440 | 12195 | AA899121 | | | General |
| 441 | 15929 | AA849740 | | hypothetical protein | General |
| 442 | 16322 | AA866240 | | | c |
| 443 | 18047 | AI171359 | | | c |
| 444 | 15966 | AA923994 | | developmentally regulated GTP-binding protein 2 | b |
| 445 | 13251 | AI179264 | | | General |
| 446 | 18095 | AI177482 | | ESTs, Weakly similar to PTNB MOUSE | i, General |
| | | | | PROTEIN-TYROSINE PHOSPHATASE SYP | |
| | | | | [M. musculus], Homo sapiens clone L48 | |
| | | | | polyadenylated HERV LTR sequence and | |
| | | | | flanking cellular sequence, mRNA, expressed | |
| | | | | sequence AA589446, hemopoietic cell | |
| | | | | phosphatase, protein tyrosine phosphatase, | |
| | | | | non-receptor type 11, protein tyrosine | |
| | | | | phosphatase, non-receptor type 13, protein | |
| | | | | tyrosine phosphatase, non-receptor type 6 | |
| 447 | 16053 | AI228596 | | | General |
| 448 | 10684 | AA849687 | | ESTs, Highly similar to I39451 amyloid-beta | e, f |
| | | | | protein [H. sapiens], collagen, type VI, alpha 3 | |
| 449 | 22691 | AI177967 | | EST, Weakly similar to TGFB_HUMAN | General |
| | | | | LATENT TRANSFORMING GROWTH | |
| | | | | FACTOR BETA BINDING PROTEIN 1 | |
| | | | | PRECURSOR [H. sapiens], RIKEN cDNA | |
| | | | | 23146A13 gene, hypothetical protein MGC131, | |
| | | | | latent transforming growth factor beta binding | |
| | | | | protein 1, latent transforming growth factor beta | |
| | | | | binding protein 2, latent transforming growth | |
| | | | | factor beta binding protein 3, transforming | |
| | | | | growth factor-beta (TGF-beta) masking protein | |
| | | | | large subunit | |
| 450 | 15438 | AI179399 | collagen, type V, alpha 2, | EST, Highly similar to CA13_HUMAN | e |
| | | | procollagen, type V, | COLLAGEN ALPHA 1(III) CHAIN | |
| | | | alpha 2 | PRECURSOR [H. sapiens], EST, Weakly | |
| | | | | similar to CA25_HUMAN COLLAGEN ALPHA | |
| | | | | 2(V) CHAIN PRECURSO [H. sapiens], EST, | |
| | | | | Weakly similar to I4967 procollagen type V | |
| | | | | alpha 2 - mouse [M. musculus], RIKEN cDNA | |
| | | | | 2812D19 gene, collagen, type III, alpha 1 | |
| | | | | (Ehlers-Danlos syndrome type IV, autosomal | |
| | | | | dominant), collagen, type V, alpha 2, | |
| | | | | hypothetical protein DKFZp434F318, | |
| | | | | hypothetical protein MGC12921, procollagen, | |
| | | | | type III, alpha 1, procollagen, type V, alpha 2, | |
| | | | | procollagen, type XIII, alpha 1 | |
| 451 | 20975 | AA799599 | | | f, General |
| 452 | 15048 | M24542 | | EST, Moderately similar to UCRI RAT | c, i |
| | | | | UBIQUINOL-CYTOCHROME C REDUCTASE | |
| | | | | IRON-SULFUR SUBUNIT, MITOCHONDRIAL | |
| | | | | PRECURSOR [R. norvegicus], EST, Weakly | |
| | | | | similar to UCRI_HUMAN UBIQUINOL- | |
| | | | | CYTOCHROME C REDUCTASE IRON- | |
| | | | | SULFUR SUBUNIT, MITOCHONDRIAL | |
| | | | | PRECURSOR [H. sapiens], ESTs, Moderately | |
| | | | | similar to UCRI_HUMAN UBIQUINOL- | |
| | | | | CYTOCHROME C REDUCTASE IRON- | |
| | | | | SULFUR SUBUNIT, MITOCHONDRIAL | |
| | | | | PRECURSOR [H. sapiens], Human DNA | |
| | | | | sequence from clone RP1-228J4 on | |
| | | | | chromosome 6 Contains a pseudogene similar | |
| | | | | to UQCRFS1 (ubiquinol-cytochrome c | |
| | | | | reductase, Rieske iron-sulfur polypeptide 1), | |
| | | | | ESTs, an STS and GSSs, RIKEN cDNA | |
| | | | | 44342G14 gene, expressed sequence | |
| | | | | AI87555, ubiquinol-cytochrome c reductase, | |
| | | | | Rieske iron-sulfur polypeptide 1 | |
| 453 | 19379 | AI102711 | | EST, Moderately similar to S34195 ribosomal | General |
| | | | | protein L3, cytosolic [H. sapiens], ESTs, Highly | |
| | | | | similar to S34195 ribosomal protein L3, | |
| | | | | cytosolic [H. sapiens], ESTs, Weakly similar to | |
| | | | | RL3 MOUSE 6S RIBOSOMAL PROTEIN L3 | |
| | | | | [M. musculus] | |
| 454 | 12583 | AI234251 | | | General |
| 455 | 19480 | AA944442 | | ESTs, Moderately similar to JC2324 LIM | c |
| | | | | protein [H. sapiens], Homo sapiens cDNA | |
| | | | | FLJ13238 fis, clone OVARC144, LIM and | |
| | | | | senescent cell antigen-like domains 1, | |
| | | | | expressed sequence AV278559, expressed | |
| | | | | sequence AW18311, four and a half LIM | |
| | | | | domains 2, paxillin, pinch-2, transforming | |
| | | | | growth factor beta 1 induced transcript 1, | |
| | | | | vascular Rab-GAP/TBC-containing | |
| 456 | 7700 | AI105383 | | | General |
| 457 | 21996 | AA946036 | | | f |
| 458 | 26148 | AI013396 | | | General |
| 459 | 9551 | AI013558 | | | d |
| 460 | 23632 | AI237273 | | | d, f, |
| | | | | | General |
| 461 | 15292 | AF012714 | multiple inositol | | c |
| | | | polyphosphate histidine | | |
| | | | phosphatase 1, multiple | | |
| | | | inositol polyphosphate | | |
| | | | histidine phosphatase, 1 | | |
| 462 | 6632 | AI235277 | | | General |
| 463 | 18406 | AI236168 | | | General |
| 464 | 11865 | AA866383 | | | General |
| 465 | 20461 | AI639350 | | | i, General |
| 466 | 11728 | AI007884 | | | d |
| 467 | 6562 | AI177734 | | | d, General |
| 468 | 3046 | AA997706 | | | h |
| 469 | 25730 | X63369 | | | General |
| 470 | 23166 | AA859954 | | | General |
| 471 | 3271 | AI010303 | | | e |
| 472 | 4626 | AI104744 | | | General |
| 473 | 6430 | AI232319 | | RIKEN cDNA 18115E19 gene, erythrocyte | General |
| | | | | membrane protein band 7.2 (stomatin), | |
| | | | | expressed sequence AI79225 | |
| 474 | 6262 | AI177125 | | | General |
| 475 | 8786 | AA996993 | | IK cytokine, down-regulator of HLA II, Mus | d |
| | | | | musculus, Similar to IK cytokine, down- | |
| | | | | regulator of HLA II, clone MGC: 2558 | |
| | | | | IMAGE: 492184, mRNA, complete cds | |
| 476 | 12946 | AI228291 | | | General |
| 477 | 23015 | AI227724 | | | f, General |
| 478 | 15949 | AA963780 | | | i |
| 479 | 5458 | AI009756 | programmed cell death 6 | EST, Moderately similar to T14756 hypothetical | g, i, |
| | | | interacting protein, | protein DKFZp564F923.1 [H. sapiens], EST, | General |
| | | | programmed cell death 6- | Weakly similar to A28996 proline-rich protein | |
| | | | interacting protein | M14 precursor - mouse [M. musculus], EST, | |
| | | | | Weakly similar to PRP4_HUMAN SALIVARY | |
| | | | | PROLINE-RICH PROTEIN PO PRECURSOR | |
| | | | | [H. sapiens], expressed sequence AI462446, | |
| | | | | poly(A)-binding protein, nuclear 1, proline rich | |
| | | | | protein, proline rich protein 2, proline-rich | |
| | | | | protein BstNI subfamily 4, protein tyrosine | |
| | | | | phosphatase, non-receptor type 23 | |
| 480 | 11726 | AA849518 | | | d |
| 481 | 22197 | AI178527 | | | General |
| 482 | 21311 | AI178688 | | | General |
| 483 | 16092 | AI009012 | | ESTs, Moderately similar to T13152 WDR1 | g, i, |
| | | | | protein [H. sapiens], WD repeat domain 1 | General |
| 484 | 15283 | AA858548 | | | i, General |
| 485 | 23601 | AA955126 | | ESTs, Moderately similar to MYB-RELATED | f |
| | | | | PROTEIN B [M. musculus], myeloblastosis | |
| | | | | oncogene-like 2, v-myb avian myeloblastosis | |
| | | | | viral oncogene homolog-like 2 | |
| 486 | 2418 | AI013790 | | DKFZP586D623 protein, hypothetical protein | e |
| | | | | MGC123 | |
| 487 | 3214 | AI235483 | | | General |
| 488 | 20056 | AI639504 | | | General |
| 489 | 6431 | AA859085 | | | General |
| 490 | 17145 | M38566 | | serine (or cysteine) proteinase inhibitor, clade F | i |
| | | | | (alpha-2 antiplasmin, pigment epithelium | |
| | | | | derived factor), member 2, serine protease | |
| | | | | inhibitor 2-2 | |
| 491 | 15492 | AA892376 | | | h |
| 492 | 23687 | AI137958 | | | e |
| 493 | 17224 | AI179883 | | ESTs, Highly similar to MG15_HUMAN | c |
| | | | | TRANSCRIPTION FACTOR-LIKE PROTEIN | |
| | | | | MRG15 (MORF-RELATED GENE 15 | |
| | | | | PROTEIN) (MSL3-1 PROTEIN) (PROTEIN | |
| | | | | HSPC8/HSPC61) [H. sapiens], MORF-related | |
| | | | | gene 15 | c |
| 494 | 3682 | AA998964 | | | c |
| 495 | 21818 | AF036537 | | ESTs, Highly similar to A55318 | c |
| | | | | serine/threonine protein kinase [M. musculus], | |
| | | | | ESTs, Weakly similar to RIP MOUSE | |
| | | | | SERINE/THREONINE PROTEIN KINASE RIP | |
| | | | | [M. musculus], Human DNA sequence from | |
| | | | | clone RP5-1182A14 on chromosome 1 | |
| | | | | Contains part of a gene similar to rat Espin, a | |
| | | | | pseudogene similar to KIAA454, a gene similar | |
| | | | | to MST1 (macrophage stimulating 1 | |
| | | | | (hepatocyte growth factor-like)), a pseudogene | |
| | | | | similar to KIAA445, two isoforms of a novel | |
| | | | | gene (isoform 2 is the gene for KIAA1245 | |
| | | | | protein), ESTs, STSs, GSSs and CpG islands, | |
| | | | | ankyrin repeat domain 3, cerebral cavernous | |
| | | | | malformations 1, mitogen activated protein | |
| | | | | kinase kinase kinase 12, mitogen-activated | |
| | | | | protein kinase kinase kinase 12, receptor | |
| | | | | (TNFRSF)-interacting serine-threonine kinase | |
| | | | | 1, receptor interacting protein 3, receptor- | |
| | | | | interacting serine-threonine kinase 2 | |
| 496 | 3434 | AI232014 | | | General |
| 497 | 15084 | AA799397 | | | a |
| 498 | 23013 | AI230743 | ARP3 (actin-related | ARP3 (actin-related protein 3, yeast) homolog, | General |
| | | | protein 3, yeast) homolog, | EST, Weakly similar to ARP3_HUMAN ACTIN- | |
| | | | actin-related protein 3 | LIKE PROTEIN 3 [H. sapiens], Homo sapiens | |
| | | | homolog (yeast) | FKSG73 (FKSG73) mRNA, complete cds, | |
| | | | | RIKEN cDNA 6141G9 gene, actin, alpha 1, | |
| | | | | skeletal muscle, actin-related protein 3-beta | |
| 429 | 25702 | X58465 | ribosomal protein S5 | EST, Moderately similar to 4S RIBOSOMAL | e |
| | | | | PROTEIN S5 [R. norvegicus], ESTs, Weakly | |
| | | | | similar to S55916 ribosomal protein S5, | |
| | | | | cytosolic [H. sapiens], ribosomal protein S5 | |
| 499 | 3817 | AA926328 | | EST, Weakly similar to 143B_HUMAN 14-3-3 | General |
| | | | | PROTEIN BETA/ALPHA [H. sapiens], ESTs, | |
| | | | | Highly similar to A Chain A, 14-3-3 | |
| | | | | ZetaPHOSPHOPEPTIDE COMPLEX | |
| | | | | [H. sapiens], makorin, ring finger protein, 3, | |
| | | | | stratifin, tyrosine 3-monooxgenase/tryptophan 5 | |
| | | | | monooxgenase activation protein, beta | |
| | | | | polypeptide, tyrosine 3- | |
| | | | | monooxygenase/tryptophan 5-monooxygenase | |
| | | | | activation protein, zeta polypeptide | |
| 500 | 3669 | AA957535 | | | g, i, |
| | | | | | General |
| 501 | 11331 | AI145556 | | | d |
| 502 | 15558 | AA875537 | | FUS-interacting protein (serine-arginine rich) 1, | General |
| | | | | FUS-interacting protein (serine-arginine rich) 2, | |
| | | | | Homo sapiens SRp46 splicing factor | |
| | | | | transcribed retropseudogene, Mus musculus | |
| | | | | splicing factor Sc35 (Pr264) mRNA, partial cds, | |
| | | | | alternatively spliced, Splicing factor, | |
| | | | | arginine/serine-rich, 46 kD, splicing factor, | |
| | | | | arginine/serine-rich 2 (SC-35) | |
| 503 | 23409 | AA956294 | | | General |
| 504 | 4652 | AA899642 | | | General |
| 505 | 14117 | AI171350 | | | General |
| 506 | 18744 | AI170407 | | | General |
| 507 | 11561 | AI233182 | | | General |
| 508 | 22711 | AA946072 | | | General |
| 509 | 3941 | AI011598 | | ESTs, Moderately similar to 2113291A | d, i, |
| | | | | laminin: SUBUNIT, Usher syndrome 2A | General |
| | | | | (autosomal recessive, mild) homolog (human), | |
| | | | | hypothetical protein, MGC: 8159, laminin, alpha 5 | |
| 510 | 23464 | AA925876 | | | General |
| 511 | 168 | AA924985 | calsequestrin 2, | EST, Weakly similar to CAQC RAT | h |
| | | | calsequestrin 2 (cardiac | CALSEQUESTRIN, CARDIAC MUSCLE | |
| | | | muscle) | ISOFORM PRECURSOR [R. norvegicus], | |
| | | | | ESTs, Moderately similar to CAQC RAT | |
| | | | | CALSEQUESTRIN, CARDIAC MUSCLE | |
| | | | | ISOFORM PRECURSOR [R. norvegicus], | |
| | | | | calsequestrin 1, calsequestrin 1 (fast-twitch, | |
| | | | | skeletal muscle), calsequestrin 2, calsequestrin | |
| | | | | 2 (cardiac muscle) | |
| 512 | 14944 | AA925364 | | | e |
| 513 | 24228 | AA800318 | | serine (or cysteine) proteinase inhibitor, clade F | b |
| | | | | (alpha-2 antiplasmin, pigment epithelium | |
| | | | | derived factor), member 2, serine (or cysteine) | |
| | | | | proteinase inhibitor, clade G (C1 inhibitor), | |
| | | | | member 1 | |
| 514 | 23822 | AA943114 | | | General |
| 515 | 12988 | AI37070 | | | b, General |
| 516 | 4499 | AA892511 | | RIKEN cDNA2111P9 gene, calcium binding | e |
| | | | | protein P22, hepatocellular carcinoma antigen | |
| | | | | gene 52, hypothetical protein FLJ267, tescalcin | |
| 517 | 12274 | AA964306 | | | General |
| 518 | 6094 | AA818911 | | | d |
| 519 | 19257 | AI030775 | | expressed sequence AI323765, | b |
| | | | | histocompatibility 2, class II antigen E alpha, | |
| | | | | major histocompatibility complex, class II, DP | |
| | | | | alpha 2 (pseudogene), major histocompatibility | |
| | | | | complex, class II, DR alpha | |
| 520 | 17847 | AI178214 | | | General |
| 521 | 18887 | AA892860 | | | General |
| 522 | 20740 | S69874 | | EST, Weakly similar to FABE HUMAN FATTY | c, d, |
| | | | | ACID-BINDING PROTEIN, EPIDERMAL | General |
| | | | | [H. sapiens], fatty acid binding protein 5, | |
| | | | | epidermal | |
| 523 | 4770 | AI235915 | | | f |
| 524 | 21705 | AA900684 | | EST, Weakly similar to Y64_HUMAN | f |
| | | | | HYPOTHETICAL PROTEIN KIAA64 | |
| | | | | [H. sapiens], ESTs, Moderately similar to | |
| | | | | Y64_HUMAN HYPOTHETICAL PROTEIN | |
| | | | | KIAA64 [H. sapiens], ESTs, Weakly similar to | |
| | | | | Y64_HUMAN HYPOTHETICAL PROTEIN | |
| | | | | KIAA64 [H. sapiens], sorting nexin 17 | |
| 525 | 18797 | AI236618 | | Homo sapiens cDNA FLJ13574 fis, clone | General |
| | | | | PLACE18625, hypothetical protein, hypothetical | |
| | | | | protein FLJ2668, similar to S. cerevisiaeSSM4 | |
| 526 | 22212 | AI236294 | | EST, Weakly similar to IF6_HUMAN | General |
| | | | | EUKARYOTIC TRANSLATION INITIATION | |
| | | | | FACTOR 6 [H. sapiens], Mus musculus 1 days | |
| | | | | neonate cerebellum cDNA, RIKEN full-length | |
| | | | | enriched library, clone: 65342L5, full insert | |
| | | | | sequence, integrin beta 4 binding protein | |
| 527 | 2153 | U75404 | A kinase (PRKA) anchor | | General |
| | | | protein (gravin) 12 | | |
| 528 | 21654 | U53184 | | | i, General |
| 529 | 3191 | AI013075 | | ESTs, Weakly similar to T3454 ALR protein | General |
| | | | | [H. sapiens], chromatin-specific transcription | |
| | | | | elongation factor, 14 kDa subunit, hypothetical | |
| | | | | protein FLJ2144 similar to Rbig1, | |
| | | | | myeloid/lymphoid or mixed-lineage leukemia 2 | |
| 530 | 16613 | AA874784 | | | e, f, |
| | | | | | General |
| 531 | 5482 | AI180252 | | | General |
| 532 | 14337 | AI180414 | | EST, Highly similar to T1416 probable GTPase- | General |
| | | | | activating protein SPA-1 - rat [R. norvegicus], | |
| | | | | ESTs, Highly similar to T1416 probable | |
| | | | | GTPase-activating protein SPA-1 - rat | |
| | | | | [R. norvegicus], KIAA44 protein, RIKEN cDNA | |
| | | | | 261511M17 gene, expressed sequence | |
| | | | | AW213287, signal-induced proliferation | |
| | | | | associated gene 1 | |
| 533 | 23471 | AA955162 | | | General |
| 534 | 4098 | AI008642 | | Acid nuclear phosphoprotein 32 (leucine rich), | i, General |
| | | | | ESTs, Weakly similar to LEUCINE-RICH | |
| | | | | ACIDIC NUCLEAR PROTEIN [R. norvegicus], | |
| | | | | acidic nuclear phosphoprotein 32, acidic protein | |
| | | | | rich in leucines, cerebellar ataxia 3, pp32 | |
| | | | | related 1, pp32 related 2, putative human HLA | |
| | | | | class II associated protein I | |
| 535 | 23372 | AI031002 | | | h |
| 536 | 18217 | AA858930 | | | General |
| 537 | 3905 | AI103403 | neural polypyrimidine | ESTs, Moderately similar to S15552 | General |
| | | | tract binding protein, | polypyrimidine tract-binding protein 1 - rat | |
| | | | polypyrimidine tract | [R. norvegicus], ESTs, Weakly similar to | |
| | | | binding protein | S15552 polypyrimidine tract-binding protein 1 - | |
| | | | | rat [R. norvegicus], RIKEN cDNA 28136L13 | |
| | | | | gene, expressed sequence AW17884, | |
| | | | | heterogeneous nuclear ribonucleoprotein L, | |
| | | | | neural polypyrimidine tract binding protein, | |
| | | | | polypyrimidine tract binding protein, | |
| | | | | polypyrimidine tract binding protein 2 | |
| 538 | 24375 | AI104979 | | | General |
| 539 | 14256 | AI176845 | | HSPC163 protein, RIKEN cDNA D533D3 gene, | General |
| | | | | cornichon homolog (Drosophila) | |
| 540 | 18349 | AA799744 | | | General |
| 541 | 2310 | AI029969 | | | General |
| 542 | 3437 | AA892897 | | | General |
| 543 | 806 | AI169231 | | Gene 33/Mig-6, RIKEN cDNA 132F13 gene | General |
| 544 | 11531 | AA799773 | | EST, Moderately similar to ABP2_HUMAN | g, h, i, |
| | | | | ENDOTHELIAL ACTIN-BINDING PROTEIN | General |
| | | | | [H. sapiens], ESTs, Moderately similar to | |
| | | | | ABP2_HUMAN ENDOTHELIAL ACTIN- | |
| | | | | BINDING PROTEIN [H. sapiens], filamin A, | |
| | | | | alpha (actin-binding protein-28), filamin B, beta | |
| | | | | (actin-binding protein-278) | |
| 545 | 15181 | AI235234 | | | i |
| 546 | 22689 | AA945962 | | | General |
| 547 | 9084 | AA893717 | | | f |
| 548 | 5307 | AA893529 | | DNA segment, Chr 12, ERATO Doi 748, | b |
| | | | | expressed, General transcription factor IIIA | |
| 549 | 25663 | X05472 | | | e |
| 550 | 18278 | AI105080 | | 3-oxoacid CoA transferase, hypothetical protein | General |
| | | | | FKSG25 | |
| 551 | 6044 | AI011285 | | | a, General |
| 552 | 17361 | AA859114 | | | i, General |
| 553 | 22464 | AI009713 | | | d |
| 554 | 8137 | AA800749 | | | e |
| 555 | 16426 | X70369 | collagen, type III, alpha 1 | EST, Highly similar to CA13_HUMAN | c, e |
| | | | (Ehlers-Danlos syndrome | COLLAGEN ALPHA 1(III) CHAIN | |
| | | | type IV, autosomal | PRECURSOR [H. sapiens], EST, Moderately | |
| | | | dominant), procollagen, | similar to CA13_HUMAN COLLAGEN ALPHA | |
| | | | type III, alpha 1 | 1(III) CHAIN PRECURSOR [H. sapiens], EST, | |
| | | | | Weakly similar to CGHU7L collagen alpha 1(III) | |
| | | | | chain precursor [H. sapiens], ESTs, Highly | |
| | | | | similar to CA21_HUMAN COLLAGEN ALPHA | |
| | | | | 2(l) CHAIN PRECURSOR [H. sapiens], collagen | |
| | | | | type V, alpha 2, collagen, type III, alpha 1 | |
| | | | | (Ehlers-Danlos syndrome type IV, autosomal | |
| | | | | dominant), macrophage receptor with | |
| | | | | collagenous structure, procollagen, type III, | |
| | | | | alpha 1 | |
| 556 | 24237 | AA817726 | | | General |
| 557 | 17950 | AI236590 | | | General |
| 558 | 18172 | AI058364 | | CDC37 (cell division cycle 37, S. cerevisiae, | d, g, |
| | | | | homolog), ESTs, Moderately similar to G2313 | General |
| | | | | CDC37 homolog [H. sapiens], Hsp9-associating | |
| | | | | relative of Cdc37 | |
| 559 | 22614 | AI031004 | | | d |
| 560 | 23005 | AA942770 | | | General |
| 561 | 17285 | J02827 | branched chain keto acid | | General |
| | | | dehydrogenase E1, alpha | | |
| | | | polypeptide (maple syrup | | |
| | | | urine disease), branched | | |
| | | | chain ketoacid | | |
| | | | dehydrogenase E1, alpha | | |
| | | | polypeptide | | |
| 562 | 15885 | AA965207 | | EST, Highly similar to T14795 hypothetical | d |
| | | | | protein DKFZp434E171.1 [H. sapiens] | |
| 563 | 5461 | AI044338 | | | General |
| 564 | 22677 | AA942718 | BCL2-like 1, Bcl2-like | BCL2-like 1, BCL2-like 2, Bcl-2-related ovarian | General |
| | | | | killer protein, Bcl-2-related ovarian killer protein- | |
| | | | | like, Bcl-w protein, Bcl2-like, Bcl2-like 2 | |
| 565 | 18507 | AI175551 | | ESTs, Highly similar to S25432 translation | General |
| | | | | elongation factor eEF-1 beta chain [H. sapiens], | |
| | | | | eukaryotic translation elongation factor 1 beta 2 | |
| 566 | 8012 | AI058330 | | Complement component 4 binding protein, | General |
| | | | | alpha, ESTs, Moderately similar to NBHUC4 | |
| | | | | C4b-binding protein alpha chain precursor | |
| | | | | [H. sapiens], ESTs, Weakly similar to | |
| | | | | C4BP_HUMAN C4B-BINDING PROTEIN | |
| | | | | ALPHA CHAIN PRECURSOR [H. sapiens], Mus | |
| | | | | musculus decay accelerating factor | |
| | | | | glycosylphoshatidylinositol-anchored form | |
| | | | | (DAF) mRNA, partial cds, complement | |
| | | | | component 4-binding protein, alpha, decay | |
| | | | | accelerating factor 1, decay accelerating factor | |
| | | | | for complement (CD55, Cromer blood group | |
| | | | | system), expressed sequence AI323748 | |
| 567 | 13310 | AI177119 | | ESTs, Weakly similar to COMPLEMENT C1Q | b, General |
| | | | | SUBCOMPONENT, C CHAIN PRECURSOR | |
| | | | | [M. musculus], Homo sapiens, Similar to | |
| | | | | complement component 1, q subcomponent, c | |
| | | | | polypeptide, clone MGC: 17279 | |
| | | | | IMAGE: 4212772, mRNA, complete cds, | |
| | | | | complement component 1, q subcomponent, | |
| | | | | beta polypeptide, complement component 1, q | |
| | | | | subcomponent, c polypeptide, expressed | |
| | | | | sequence AI385742 | |
| 568 | 6548 | AI072658 | | | d, General |
| 569 | 7941 | AI043958 | | | g, i, |
| | | | | | General |
| 570 | 13619 | AI179464 | | | General |
| 571 | 3207 | AA997466 | | | General |
| 572 | 20582 | AA859688 | | AU RNA-binding protein/enoyl-Coenzyme A | f, General |
| | | | | hydratase, EST, Weakly similar to I37195 AU- | |
| | | | | specific RNA-binding protein/enoyl-CoA | |
| | | | | hydratase homolog [H. sapiens], hypothetical | |
| | | | | protein FLJ1948, uncharacterized | |
| | | | | hypothalamus protein HCDASE | |
| 573 | 21796 | AI012221 | | EST X83352, ESTs, Highly similar to T17226 | g, General |
| | | | | hypothetical protein DKFZp566G223.1 | |
| | | | | [H. sapiens], Homo sapiens, Similar to chloride | |
| | | | | intracellular channel 4, clone MGC: 8812 | |
| | | | | IMAGE: 3861372, mRNA, complete cds, RIKEN | |
| | | | | cDNA 573531E12 gene, chloride intracellular | |
| | | | | channel 1, chloride intracellular channel 4, | |
| | | | | chloride intracellular channel 4 (mitochondrial), | |
| | | | | hypothetical protein DKFZp434N127, | |
| | | | | intracellular chloride ion channel protein p64H1 | |
| 574 | 19071 | AA850524 | | ESTs, Weakly similar to B5625 transcription | f |
| | | | | factor LBP1b [H. sapiens], Mus musculus, clone | |
| | | | | MGC: 785 IMAGE: 349986, mRNA, complete | |
| | | | | cds, upstream binding protein 1, upstream | |
| | | | | binding protein 1 (LBP-1a) | |
| 575 | 24200 | AI012356 | | | General |
| 576 | 24246 | AA963703 | | | g, General |
| 577 | 6133 | AA866234 | | elongation factor for selenoprotein translation | c |
| 578 | 21632 | AI009167 | | BCL2-associated athanogene 2, ESTs, Highly | General |
| | | | | similar to T8764 hypothetical protein | |
| | | | | DKFZp586C21.1 [H. sapiens] | |
| 579 | 13772 | AA851926 | | DEAD (aspartate-glutamate-alanine-aspartate) | General |
| | | | | box polypeptide 5, DEAD-box protein, DEAD/H | |
| | | | | (Asp-Glu-Ala-Asp/His) box polypeptide 5 (RNA | |
| | | | | helicase, 68 kD), ESTs, Highly similar to | |
| | | | | 146327A growth regulated nuclear 68 protein | |
| | | | | [H. sapiens], Homo sapiens, Similar to RIKEN | |
| | | | | cDNA 23161O4 gene, clone MGC: 21583 | |
| | | | | IMAGE: 4479998, mRNA, complete cds, | |
| | | | | KIAA81 gene product, RIKEN cDNA 2617K22 | |
| | | | | gene, RIKEN cDNA 492156D17 gene, RIKEN | |
| | | | | cDNA 91343L19 gene, RNA helicase, Rattus | |
| | | | | norvegicus RNA helicase with arginine-serine- | |
| | | | | rich domain mRNA, complete cds, expressed | |
| | | | | sequence AI32543 | |
| 580 | 22247 | AA943537 | | ajuba, expressed sequence AI48116, | i, General |
| | | | | expressed sequence R75157, zyxin | |
| 581 | 23732 | AA957653 | | ESTs, Moderately similar to JC5614 RNB6 | General |
| | | | | protein - rat [R. norvegicus], ESTs, Weakly | |
| | | | | similar to NPC DERIVED PROLINE RICH | |
| | | | | PROTEIN 1 [M. musculus], Ena-vasodilator | |
| | | | | stimulated phosphoprotein, NPC derived | |
| | | | | proline rich protein 1, RNB6, enabled homolog | |
| | | | | (Drosophila), likely ortholog of mouse NPC | |
| | | | | derived proline rich protein 1 | |
| 582 | 22385 | AA859805 | | ESTs, Weakly similar to PROTEIN-LYSINE 6- | e |
| | | | | OXIDASE PRECURSOR [R. norvegicus], Lysyl | |
| | | | | oxidase, lysyl oxidase, lysyl oxidase-like, lysyl | |
| | | | | oxidase-like 1, lysyl oxidase-like 2 | |
| 583 | 2459 | AA964755 | | | i |
| 584 | 23964 | AI234748 | | | g, General |
| 585 | 4074 | AI175990 | | | g |
| 586 | 17204 | AI171844 | | ATP synthase, H+ transporting, mitochondrial | e, g |
| | | | | F1 complex, epsilon subunit, RIKEN cDNA | |
| | | | | 24143G19 gene, expressed sequence AV645 | |
| 587 | 6560 | AI230440 | | | d |
| 588 | 17883 | M11851 | | | a, b |
| 589 | 22937 | AA850290 | | ATPase, Class V, type 1B, ATPase, Class V, | i |
| | | | | type 1D, ATPase, class V, type 1A, EST, | |
| | | | | Highly similar to AT5B_HUMAN POTENTIAL | |
| | | | | PHOSPHOLIPID-TRANSPORTING ATPASE | |
| | | | | VB [H. sapiens], ESTs, Weakly similar to AT5A | |
| | | | | MOUSE POTENTIAL PHOSPHOLIPID- | |
| | | | | TRANSPORTING ATPASE VA [M. musculus] | |
| 590 | 4944 | AA924405 | | ESTs, Weakly similar to NEUROFILAMENT | g, General |
| | | | | TRIPLET H PROTEIN [M. musculus], RIKEN | |
| | | | | cDNA 619L18 gene, RIKEN cDNA 133A17 | |
| | | | | gene, RIKEN cDNA 241142G14 gene, | |
| | | | | nucleolar protein (KKE/D repeat) | |
| 591 | 3822 | AA900863 | | DNA segment, Chr 17, human D6S81E 1, | g, General |
| | | | | ESTs, Highly similar to S33681 translation | |
| | | | | initiation factor eIF-4A.I [H. sapiens], HLA-B | |
| | | | | associated transcript 1, Human clone 23933 | |
| | | | | mRNA sequence, eukaryotic translation | |
| | | | | initiation factor 4A, isoform 1, mitochondrial | |
| | | | | DEAD-box polypeptide 28, nuclear RNA | |
| | | | | helicase, DECD variant of DEAD box family | |
| 592 | 2729 | AI170363 | | | d |
| 593 | 19282 | AA955123 | | | General |
| 594 | 21740 | AI176810 | | | General |
| 595 | 23773 | AA956476 | | | General |
| 596 | 6843 | AI009768 | | | f |
| 597 | 14840 | AI237698 | | | General |
| 598 | 20038 | AA899797 | | | c, General |
| 599 | 18541 | X14671 | | ESTs, Highly similar to RL26_HUMAN 6S | e, h |
| | | | | RIBOSOMAL PROTEIN L26 [H. sapiens], | |
| | | | | ESTs, Highly similar to S33713 ribosomal | |
| | | | | protein L26, cytosolic [H. sapiens], ESTs, | |
| | | | | Weakly similar to 6S RIBOSOMAL PROTEIN | |
| | | | | L26 [R. norvegicus], ribosomal protein L26, | |
| | | | | ribosomal protein L26 pseudogene 1 | |
| 600 | 13966 | AI231421 | | | d, General |
| 601 | 17234 | AI102741 | tissue inhibitor of | tissue inhibitor of metalloproteinase 3, tissue | h |
| | | | metalloproteinase 3, | inhibitor of metalloproteinase 3 (Sorsby fundus | |
| | | | tissue inhibitor of | dystrophy, pseudoinflammatory) | |
| | | | metalloproteinase 3 | | |
| | | | (Sorsby fundus | | |
| | | | dystrophy, | | |
| | | | pseudoinflammatory) | | |
| 602 | 22544 | AA851245 | | apoptosis-associated speck-like protein | General |
| | | | | containing a CARD, death effector filament- | |
| | | | | forming Ced-4-like apoptosis protein, | |
| | | | | hypothetical protein PP144, tumor up-regulated | |
| | | | | CARD-containing antagonist of caspase nine | |
| 603 | 13023 | AI233740 | | Aldehyde reductase 1 (low Km aldose | General |
| | | | | reductase) (5.8 kb Pstl fragment, probably the | |
| | | | | functional gene), EST, Highly similar to Aldose | |
| | | | | Reductase (E.C.1.1.1.21) [H. sapiens], ESTs, | |
| | | | | Moderately similar to ALDOSE REDUCTASE | |
| | | | | [R. norvegicus], ESTs, Moderately similar to | |
| | | | | ALDOSE REDUCTASE-RELATED PROTEIN 2 | |
| | | | | [M. musculus], Homo sapiens, Similar to RIKEN | |
| | | | | cDNA 11118J12 gene, clone IMAGE: 3865164, | |
| | | | | mRNA, partial cds, RIKEN cDNA 2315E1 gene, | |
| | | | | aldo-keto reductase family 1, member A4 | |
| | | | | (aldehyde reductase), aldo-keto reductase | |
| | | | | family 1, member B1 (aldose reductase), aldo- | |
| | | | | keto reductase family 1, member B1 (aldose | |
| | | | | reductase), aldo-keto reductase family 1, | |
| | | | | member B3 (aldose reductase), fibroblast | |
| | | | | growth factor regulated protein | |
| 604 | 24209 | AI172423 | | | i, General |
| 605 | 23626 | AA955540 | | | General |
| 606 | 4670 | AI233714 | | | h |
| 607 | 18215 | AA943367 | | | h |
| 608 | 3014 | AI176362 | | | c, General |
| 609 | 16756 | AA818089 | | glycyl-tRNA synthetase | General |
| 610 | 22605 | AA859447 | | | i |
| 611 | 5283 | AF090113 | | ESTs, Highly similar to T32733 AMPA | h |
| | | | | glutamate receptor interacting protein GRIP - | |
| | | | | rat [R. norvegicus], Glutamate receptor | |
| | | | | interacting protein, KIAA1365 protein, Lin-7b | |
| | | | | protein; likely ortholog of mouse LIN-7B; | |
| | | | | mammalian LIN-7 protein 2, Mus musculus | |
| | | | | grip1 mRNA for glutamate receptor interacting | |
| | | | | protein 1a-L, complete cds, Vertebrate LIN7 | |
| | | | | homolog 1, Tax interaction protein 33, channel- | |
| | | | | interacting PDZ domain protein, discs, large | |
| | | | | (Drosophila) homolog 2 (chapsyn-11), multiple | |
| | | | | PDZ domain protein, semaF cytoplasmic | |
| | | | | domain associated protein 3, syntaxin binding | |
| | | | | protein 4 | |
| 612 | 6043 | AI059588 | | | g |
| 613 | 21474 | AA851361 | | | d |
| 614 | 23038 | AA900881 | branched chain | Homo sapiens cDNA: FLJ2127 fis, clone | General |
| | | | aminotransferase 1, | COL1749, branched chain aminotransferase 1, | |
| | | | cytosolic | cytosolic | |
| 615 | 13336 | AI237070 | | | a, b, |
| | | | | | General |
| 616 | 3988 | AI008546 | proteasome (prosome, | EST, Weakly similar to SNHUC8 multicatalytic | d |
| | | | macropain) subunit, alpha | endopeptidase complex [H. sapiens], ESTs, | |
| | | | type 3, proteasome | Highly similar to PRC8 MOUSE | |
| | | | (prosome, macropain) | PROTEASOME COMPONENT C8 | |
| | | | subunit, alpha type, 3 | [M. musculus], ESTs, Highly similar to | |
| | | | | PROTEASOME COMPONENT C8 | |
| | | | | [R. norvegicus], ESTs, Weakly similar to | |
| | | | | SNHUC8 multicatalytic endopeptidase complex | |
| | | | | [H sapiens], proteasome (prosome, macropain) | |
| | | | | subunit, alpha type 3, proteasome (prosome, | |
| | | | | macropain) subunit, alpha type, 3 | |
| 617 | 20823 | AI176302 | | EST, Weakly similar to UBIM_HUMAN | d |
| | | | | UBIQUITIN-LIKE PROTEIN FUBI {SUB 1-74 | |
| | | | | [H. sapiens], EST, Weakly similar to ubiquitin- | |
| | | | | like protein/ribosomal protein S3 | |
| | | | | [R. norvegicus], Finkel-Biskis-Reilly murine | |
| | | | | sarcoma virus (FBR-MuSV) ubiquitously | |
| | | | | expressed (fox derived), Finkel-Biskis-Reilly | |
| | | | | murine sarcoma virus (FBR-MuSV) ubiquitously | |
| | | | | expressed (fox derived); ribosomal protein S3 | |
| 618 | 23044 | AF034218 | | RIKEN cDNA 4632428M18 gene, | General |
| | | | | hyaluronidase 1, hyaluronidase 2, | |
| | | | | hyaluronoglucosaminidase 1, | |
| | | | | hyaluronoglucosaminidase 2, | |
| | | | | hyaluronoglucosaminidase 3, sperm adhesion | |
| | | | | molecule | |
| 619 | 19013 | AI639256 | | | a |
| 620 | 16124 | AI176963 | | Cbp/p3-interacting transactivator, with Glu/Asp- | c |
| | | | | rich carboxy-terminal domain, 2, Cbp/p3- | |
| | | | | interacting transactivator, with Glu/Asp-rich | |
| | | | | carboxy-terminal domain, 4, ESTs, Weakly | |
| | | | | similar to MRG1_HUMAN MSG-RELATED | |
| | | | | PROTEIN 1 [H. sapiens], expressed sequence | |
| | | | | AW742964 | |
| 621 | 17848 | AA900460 | | T-complex 1, chaperonin containing TCP1, | General |
| | | | | subunit 7 (eta), chaperonin subunit 7 (eta), | |
| | | | | expressed sequence AI528772, expressed | |
| | | | | sequence AL22769, t-complex 1, t-complex | |
| | | | | protein 1 | |
| 622 | 19074 | AI009391 | | | f |
| 623 | 3615 | AI237645 | | Homo sapiens mRNA; cDNA DKFZp434M2227 | d, General |
| | | | | (from clone DKFZp434M2227), Homo sapiens | |
| | | | | prostate-specific membrane antigen PSM | |
| | | | | mRNA, exon 6 alternative splice variant, partial | |
| | | | | cds, RIKEN cDNA 26128K12 gene, folate | |
| | | | | hydrolase, transferrin receptor, transferrin | |
| | | | | receptor (p9, CD71), transferrin receptor 2 | |
| 624 | 11387 | AA891677 | | | General |
| 625 | 25765 | X89706 | | | General |
| 626 | 21653 | AI237535 | | | General |
| 627 | 5228 | AI233311 | | | General |
| 628 | 7299 | AI013911 | | H.sapiensPABII pseudogene, Human DNA | c, d, |
| | | | | sequence from PAC 56B9 on chromosome | General |
| | | | | 1q24-1q25. Contains profilin-like pseudogene, | |
| | | | | 6S ribosomal protein L4 pseudogene RNA | |
| | | | | binding protein, ESTs, GSS, Mus musculus | |
| | | | | adult male tongue cDNA, RIKEN full-length | |
| | | | | enriched library, clone: 23174E15, full insert | |
| | | | | sequence, RNA binding motif protein 3, RNA | |
| | | | | binding motif protein, X chromosome, RNA | |
| | | | | binding motif protein, X chromosome retrogene, | |
| | | | | cold inducible RNA-binding protein, testes- | |
| | | | | specific heterogenous nuclear | |
| | | | | ribonucleoprotein G-T | |
| 629 | 2093 | AI102097 | | | General |
| 630 | 9166 | AI137406 | | protein C receptor, endothelial, protein C | i, General |
| | | | | receptor, endothelial (EPCR) | |
| 631 | 19723 | AA818761 | | | General |
| 632 | 2741 | AA963077 | | | General |
| 633 | 22667 | AA945069 | | | General |
| 634 | 17687 | AA799531 | | | a, e |
| 635 | 23217 | AI235953 | | | General |
| 636 | 12135 | AI176418 | | | c |
| 637 | 19894 | AA859581 | | EST, Highly similar to SPERM-COATING | d |
| | | | | GLYCOPROTEIN PRECURSOR | |
| | | | | [R. norvegicus], ESTs, Weakly similar to | |
| | | | | JC4131 glioma pathogenesis-related protein | |
| | | | | [H. sapiens], Human DNA sequence from clone | |
| | | | | RP5-881L22 on chromosome 2 Contains ESTs, | |
| | | | | GSSs, STSs and CpG islands. Contains a gene | |
| | | | | for a novel protein similar to a trypsin inhibitor | |
| | | | | and four other genes for novel proteins, RIKEN | |
| | | | | cDNA 18149K24 gene, RIKEN cDNA | |
| | | | | 241114O14 gene, RIKEN cDNA 923112K8 | |
| | | | | gene, acidic epididymal glycoprotein 1, acidic | |
| | | | | epididymal glycoprotein 2, epididymal | |
| | | | | glycoprotein, glioma pathogenesis-related | |
| | | | | protein | |
| 638 | 15345 | AI171587 | | | h |
| 639 | 23165 | AI231799 | | Friedreich ataxia region gene X123 | General |
| 640 | 3391 | AA998197 | | | General |
| 641 | 16215 | AA874999 | | protein translocation complex beta | General |
| 642 | 19086 | AA892598 | | | General |
| 643 | 4725 | AA900290 | | Alpha-2-macroglobulin, ESTs, Moderately | d, General |
| | | | | similar to A2M2 MOUSE MURINOGLOBULIN 2 | |
| | | | | PRECURSOR [M. musculus], RIKEN cDNA | |
| | | | | 26137121 gene, alpha-2-macroglobulin, carbon | |
| | | | | catabolite repression 4 homolog (S. cerevisiae), | |
| | | | | expressed sequence AW456442, pregnancy- | |
| | | | | zone protein | |
| 644 | 6727 | AI233213 | | | a, g |
| 645 | 21816 | AI231217 | | EST, Highly similar to S61A RAT PROTEIN | h, General |
| | | | | TRANSPORT PROTEIN SEC61 ALPHA | |
| | | | | SUBUNIT [R. norvegicus], ESTs, Highly similar | |
| | | | | to S61A RAT PROTEIN TRANSPORT | |
| | | | | PROTEIN SEC61 ALPHA SUBUNIT | |
| | | | | [R. norvegicus], SEC61, alpha subunit (S. | |
| | | | | cerevisiae), SEC61, alpha subunit 2 (S. | |
| | | | | cerevisiae), Sec61 alpha form 2, protein | |
| | | | | transport protein SEC61 alpha subunit isoform 1 | |
| 646 | 2069 | AI103616 | | ESTs, Weakly similar to B Chain B, Crystal | g, i, |
| | | | | Structure Of Rac1 In Complex With The | General |
| | | | | Guanine Nucleotide Exchange Region Of | |
| | | | | Tiam1 [H. sapiens], ESTs, Weakly similar to | |
| | | | | RAS-RELATED C3 BOTULINUM TOXIN | |
| | | | | SUBSTRATE 1 [M. musculus], KIAA717 protein, | |
| | | | | KIAA74 gene product, Mus musculus mRNA for | |
| | | | | Rac3, complete cds, RAS-related C3 botulinum | |
| | | | | substrate 1, RIKEN cDNA 178H16 gene, | |
| | | | | aplysia ras-related homolog A2, plysia ras- | |
| | | | | related homolog A2, ras homolog gene family, | |
| | | | | member A, ras homolog gene family, member | |
| | | | | C, ras-related C3 botulinum toxin substrate 1 | |
| | | | | (rho family, small GTP binding protein Rac1) | |
| 647 | 22717 | AI235948 | | ESTs, Weakly similar to NIDOGEN | e, g |
| | | | | [R. norvegicus], RIKEN cDNA 2945C1 gene, | |
| | | | | nidogen (enactin), nidogen 1, | |
| | | | | sparc/osteonectin, cwcv and kazal-like domains | |
| | | | | proteoglycan 1 | |
| 648 | 11205 | AI172057 | | | General |
| 649 | 22498 | AA944806 | | | c |
| 650 | 7192 | AI178530 | | | c |
| 651 | 8058 | AA818475 | | | General |
| 652 | 18800 | AI178504 | | | General |
| 653 | 12376 | AI103939 | | | i |
| 654 | 12695 | AI170948 | | G protein-coupled receptor 4, G protein-coupled | i, General |
| | | | | receptor 65 | |
| 655 | 5227 | AA925924 | | | f, i, |
| | | | | | General |
| 656 | 7936 | AA875495 | | | i, General |
| 657 | 4491 | AA818798 | | cathepsin Z | General |
| 658 | 13647 | AA892367 | | EST, Weakly similar to 6S RIBOSOMAL | General |
| | | | | PROTEIN L3 [R. norvegicus], EST, Weakly | |
| | | | | similar to I8451 ribosomal protein L3 | |
| | | | | [H. sapiens], ESTs, Moderately similar to 6S | |
| | | | | RIBOSOMAL PROTEIN L3 [R. norvegicus], | |
| | | | | ESTs, Moderately similar to I8451 ribosomal | |
| | | | | protein L3 [H. sapiens], ESTs, Weakly similar to | |
| | | | | RL3 MOUSE 6S RIBOSOMAL PROTEIN L3 | |
| | | | | [M. musculus], RIKEN cDNA 11157H16 gene, | |
| | | | | ribosomal protein L3, ribosomal protein L3-like | |
| 659 | 25716 | X61295 | | | e |
| 660 | 10547 | AA800186 | | | General |
| 661 | 7760 | AI030806 | | | b, General |
| 662 | 16687 | AI013553 | | | a |
| 663 | 24040 | AA957422 | | CD3 antigen, zeta polypeptide, CD3Z antigen, | General |
| | | | | zeta polypeptide (TiT3 complex), Fc fragment | |
| | | | | of IgE, high affinity I, receptor for; gamma | |
| | | | | polypeptide, Fc receptor, IgE, high affinity I, | |
| | | | | gamma polypeptide, expressed sequence | |
| | | | | AI573376 | |
| 664 | 16154 | AI009661 | | ALL1-fused gene from chromosome 1q | i |
| 665 | 14390 | AI232385 | | | g |
| 666 | 14651 | AI235919 | | | General |
| 667 | 17289 | AA891785 | | ESTs, Highly similar to ISOCITRATE | b |
| | | | | DEHYDROGENASE [R. norvegicus], Isocitrate | |
| | | | | dehydrogenase 1, soluble, isocitrate | |
| | | | | dehydrogenase 1 (NADP+), soluble, isocitrate | |
| | | | | dehydrogenase 2 (NADP+), mitochondrial | |
| 668 | 12609 | AA997486 | | | d, i, |
| | | | | | General |
| 669 | 21657 | X61381 | | ESTs, Moderately similar to S17182 interferon- | b, i, |
| | | | | induced protein 1-8U [H. sapiens], ESTs, | General |
| | | | | Weakly similar to putative haemopoietic | |
| | | | | membrane protein [M. musculus], Human DNA | |
| | | | | sequence from clone RP4-781L3 on | |
| | | | | chromosome 1p34.3-36.11 Contains a | |
| | | | | pseudogene similar to IFITM3 (interferon | |
| | | | | inducedntransmembrane protein 3 (1-8U)), | |
| | | | | STSs and GSSs, RIKEN cDNA 1114C5 gene, | |
| | | | | interferon induced transmembrane protein 3 (1-8U), | |
| | | | | interferon induced transmembrane protein | |
| | | | | 3-like, interferon-inducible protein 16 | |
| 670 | 5384 | AA891041 | | Jun-B oncogene, jun B proto-oncogene | General |
| 671 | 5613 | AI044850 | | | b |
| 672 | 16136 | AI103983 | | RIKEN cDNA B43311C9 gene, caspase | General |
| | | | | recruitment domain family, member 6, nucleolar | |
| | | | | protein 3 (apoptosis repressor with CARD | |
| | | | | domain) | |
| 673 | 23270 | AI179601 | | | General |
| 674 | 14464 | AI104848 | | | General |
| 675 | 6053 | AA818655 | | | d |
| 676 | 19067 | AA859663 | | | General |
| 677 | 22877 | AI178819 | | adrenal gland protein AD-4 | General |
| 678 | 14257 | AI230460 | | MARCKS-like protein, Mus musculus 8 days | e |
| | | | | embryo cDNA, RIKEN full-length enriched | |
| | | | | library, clone: 573519L1, full insert sequence, | |
| | | | | Myristoylated alanine-rich protein kinase C | |
| | | | | substrate, macrophage myristoylated alanine- | |
| | | | | rich C kinase substrate, myristoylated alanine | |
| | | | | rich protein kinase C substrate, myristoylated | |
| | | | | alanine-rich protein kinase C substrate | |
| | | | | (MARCKS, 8K-L) | |
| 679 | 5132 | AA925342 | | myomesin 1, myomesin 1 (skelemin) (185 kD), | General |
| | | | | myomesin 2 | |
| 680 | 2706 | AA965083 | | | General |
| 681 | 22615 | AA945643 | | | f, General |
| 682 | 13460 | AI175375 | | | General |
| 683 | 8707 | AI059707 | | | i, General |
| 684 | 17948 | AA944581 | | HIV-1 Rev binding protein-like, Rev/Rex | General |
| | | | | activation domain binding protein-related | |
| 685 | 13082 | AI136848 | | | a, b |
| 686 | 16074 | AA874874 | | alcohol dehydrogenase 5, alcohol | f |
| | | | | dehydrogenase 5 (class III), chi polypeptide | |
| 687 | 8861 | AI070306 | | | General |
| 688 | 8594 | AI012932 | | | General |
| 689 | 22311 | AI176007 | | pM5 protein | General |
| 690 | 24268 | AI172281 | | | e |
| 691 | 9073 | AA892273 | | | a, b |
| 692 | 22423 | AA893164 | | | b |
| 693 | 5550 | AI044628 | | | General |
| 694 | 3895 | AA894029 | | | b |
| 695 | 19069 | AA943737 | endothelial differentiation | endothelial differentiation sphingolipid G-protein- | General |
| | | | sphingolipid G-protein- | coupled receptor 1, endothelial differentiation, | |
| | | | coupled receptor 1, | G-protein-coupled receptor 6, endothelial | |
| | | | endothelial differentiation, | differentiation, sphingolipid G-protein-coupled | |
| | | | sphingolipid G-protein- | receptor, 1, endothelial differentiation, | |
| | | | coupled receptor, 1 | sphingolipid G-protein-coupled receptor, 3, | |
| | | | | endothelial differentiation, sphingolipid G- | |
| | | | | protein-coupled receptor, 5, endothelial | |
| | | | | differentiation, sphingolipid G-protein-coupled | |
| | | | | receptor, 8, sphingosine 1-phosphate receptor | |
| 696 | 22666 | AA900974 | | | d, General |
| 697 | 2852 | AI177059 | | | e, General |
| 698 | 12108 | AA848963 | | | a |
| 699 | 23240 | AA893939 | | Deleted in split-hand/split-foot 1 region, split | i |
| | | | | hand/foot deleted gene 1 | |
| 700 | 4161 | AI112141 | | | General |
| 701 | 18272 | AA799294 | | | c, e, |
| | | | | | General |
| 702 | 23612 | AI170751 | | | General |
| 703 | 4790 | AA900875 | | Cbp/p3-interacting transactivator, with Glu/Asp- | General |
| | | | | rich carboxy-terminal domain, 1, Cbp/p3- | |
| | | | | interacting transactivator, with Glu/Asp-rich | |
| | | | | carboxy-terminal domain, 2, Cbp/p3-interacting | |
| | | | | transactivator, with Glu/Asp-rich carboxy- | |
| | | | | terminal domain, 4, expressed sequence | |
| | | | | AW742964 | |
| 704 | 16168 | AA893280 | | RIKEN cDNA 1312C15 gene, RIKEN cDNA | General |
| | | | | 23176L9 gene, adipose differentiation related | |
| | | | | protein, adipose differentiation-related protein | |
| 705 | 11644 | AI235282 | | EST, Moderately similar to S25111 alpha-2- | General |
| | | | | macroglobulin receptor precursor - mouse | |
| | | | | [M. musculus], ESTs, Highly similar to S25111 | |
| | | | | alpha-2-macroglobulin receptor precursor - | |
| | | | | mouse [M. musculus], low density lipoprotein | |
| | | | | receptor-related protein 1, low density | |
| | | | | lipoprotein-related protein 1 (alpha-2- | |
| | | | | macroglobulin receptor), low density lipoprotein- | |
| | | | | related protein 1B (deleted in tumors) | |
| 706 | 19057 | AI235094 | | Homo sapiens cDNA FLJ13271 fis, clone | General |
| | | | | OVARC11, Homo sapiens, Similar to cortactin | |
| | | | | isoform B, clone MGC: 3591 IMAGE: 3637586, | |
| | | | | mRNA, complete cds, Mus musculus, Similar to | |
| | | | | cortactin isoform B, clone MGC: 18474 | |
| | | | | IMAGE: 3981559, mRNA, complete cds, | |
| | | | | R.norvegicus myr3 mRNA for myosin I heavy | |
| | | | | chain, RIKEN cDNA 2312N23 gene, RIKEN | |
| | | | | cDNA 91323P14 gene, cortactin, ems1 | |
| | | | | sequence (mammary tumor and squamous cell | |
| | | | | carcinoma-associated (p8/85 src substrate), | |
| | | | | myosin IE | |
| 707 | 9501 | AI638949 | | | a |
| 708 | 24310 | AA924578 | | | e, General |
| 709 | 1283 | U61729 | | DNA segment, Chr 4, Brigham & Women's | General |
| | | | | Genetics 593 expressed, ESTs, Moderately | |
| | | | | similar to JC4899 proline rich protein - rat | |
| | | | | [R. norvegicus], RIKEN cDNA 6111E17 gene, | |
| | | | | hypothetical protein FLJ2312, proline-rich | |
| | | | | protein with nuclear targeting signal | |
| 710 | 7681 | AI030449 | | | General |
| 711 | 1439 | U57391 | | | General |
| 712 | 20872 | X51707 | ribosomal protein S19 | EST, Moderately similar to 4S RIBOSOMAL | f |
| | | | | PROTEIN S19 [R. norvegicus], EST, Weakly | |
| | | | | similar to RS19_HUMAN 4S RIBOSOMAL | |
| | | | | PROTEIN S19 [H. sapiens], ribosomal protein | |
| | | | | S19 | |
| 713 | 21660 | AI169751 | | ESTs, Moderately similar to S17182 interferon- | b, General |
| | | | | induced protein 1-8U [H. sapiens], ESTs, | |
| | | | | Weakly similar to putative haemopoietic | |
| | | | | membrane protein [M. musculus], Human DNA | |
| | | | | sequence from clone RP4-781L3 on | |
| | | | | chromosome 1p34.3-36.11 Contains a | |
| | | | | pseudogene similar to IFITM3 (interferon | |
| | | | | inducedntransmembrane protein 3 (1-8U)), | |
| | | | | STSs and GSSs, RIKEN cDNA 1114C5 gene, | |
| | | | | interferon induced transmembrane protein 3 (1-8U), | |
| | | | | interferon induced transmembrane protein | |
| | | | | 3-like, interferon-inducible protein 16 | |
| 714 | 19454 | AA998888 | | Mus musculus adult male stomach cDNA, | f |
| | | | | RIKEN full-length enriched library, | |
| | | | | clone: 22118M5, full insert sequence, expressed | |
| | | | | sequence AI8352, fibronectin type 3 and SPRY | |
| | | | | domain-containing protein, midline 1, midline 1 | |
| | | | | (Opitz/BBB syndrome), midline 2, ring finger | |
| | | | | protein 28 | |
| 715 | 12979 | AI169177 | | immediate early response 3 | General |
| 716 | 5675 | AI045026 | | | General |
| 717 | 17903 | AI231083 | | | d, General |
| 718 | 6743 | AI231219 | | | d, General |
| 719 | 23538 | AI102727 | | solute carrier family 2 (phosphate transporter), | General |
| | | | | member 1, solute carrier family 2 (phosphate | |
| | | | | transporter), member 2, solute carrier family 2, | |
| | | | | member 1, solute carrier family 2, member 2 | |
| 720 | 20617 | X53581 | | | e |
| 721 | 19416 | AA850244 | | | General |
| 722 | 16191 | AA874982 | | | c |
| 723 | 8745 | AI069939 | | | d |
| 724 | 14494 | AI234222 | | | g |
| 725 | 22681 | AA944413 | | | General |
| 726 | 21579 | AI103572 | | | General |
| 727 | 23978 | AA925352 | | | h, General |
| 728 | 25742 | X80130 | | | a, b, c |
| 729 | 14458 | AI145095 | | | General |
| 730 | 6172 | AA819646 | | | General |
| 731 | 1998 | AA817864 | | | b |
| 732 | 25545 | S77900 | | | c |
| 733 | 12999 | AI176276 | | Homo sapiens cDNA FLJ1257 fis, clone | d |
| | | | | NT2RM4895, UDP-N-acteylglucosamine | |
| | | | | pyrophosphorylase 1 | |
| 734 | 1159 | AA891949 | | | g, General |
| 735 | 18907 | AI178971 | | EST, Moderately similar to HART1 hemoglobin | a, b, |
| | | | | alpha-1 chain - rat [R. norvegicus], EST, Weakly | General |
| | | | | similar to A45964 hemoglobin alpha chain - | |
| | | | | mouse [M. musculus], ESTs, Moderately similar | |
| | | | | to HART1 hemoglobin alpha-1 chain - rat | |
| | | | | [R. norvegicus], Hemoglobin, alpha 1, | |
| | | | | hemoglobin alpha, adult chain 1, hemoglobin, | |
| | | | | alpha 1, hemoglobin, alpha 2 | |
| 736 | 25647 | U83119 | | | e |
| 737 | 17892 | AI228438 | | | a |
| 738 | 18447 | AA849939 | | | b, General |
| 401 | 18473 | AI168975 | | | General |
| 739 | 4222 | AA860024 | | EST, Moderately similar to EF1G_HUMAN | General |
| | | | | ELONGATION FACTOR 1-GAMMA | |
| | | | | [H. sapiens], ESTs, Highly similar to | |
| | | | | EF1G_HUMAN ELONGATION FACTOR 1- | |
| | | | | GAMMA [H. sapiens], Homo sapiens cDNA | |
| | | | | FLJ11216 fis, clone PLACE182, eukaryotic | |
| | | | | translation elongation factor 1 gamma | |
| 740 | 15197 | AI105444 | | | General |
| 741 | 22958 | AI171374 | | | d, General |
| 742 | 9111 | AI073176 | | makorin, ring finger protein, 1, makorin, ring | General |
| | | | | finger protein, 2, makorin, ring finger protein, 3, | |
| | | | | makorin, ring finger protein, 4 | |
| 743 | 23110 | AI169640 | | | d |
| 744 | 20998 | AA799803 | | EST, Moderately similar to MAS2_HUMAN | General |
| | | | | MANNAN-BINDING LECTIN SERINE | |
| | | | | PROTEASE 2 PRECURSOR [H. sapiens], | |
| | | | | Rattus norvegicus mRNA for serine protease, | |
| | | | | complete cds, complement C1r-like proteinase | |
| | | | | precursor, complement component 1, r | |
| | | | | subcomponent, complement component 1, s | |
| | | | | subcomponent, protein C | |
| 745 | 23184 | AI176554 | | | d |
| 746 | 14149 | AA998172 | | platelet-activating factor acetylhydrolase, | i |
| | | | | isoform 1b, alpha2 subunit, platelet-activating | |
| | | | | factor acetylhydrolase, isoform lb, beta subunit | |
| | | | | (3 kD) | |
| 747 | 23816 | AA956596 | | | e |
| 748 | 8494 | AI059968 | | | i, General |
| 749 | 21841 | AA996499 | | EST, Weakly similar to C1QA_HUMAN | b, General |
| | | | | COMPLEMENT C1Q SUBCOMPONENT, A | |
| | | | | CHAIN PRECURSO [H. sapiens], complement | |
| | | | | component 1, q subcomponent, alpha | |
| | | | | polypeptide, complement component 1, q | |
| | | | | subcomponent, beta polypeptide, expressed | |
| | | | | sequence AI255395, expressed sequence | |
| | | | | AI385742 | |
| 750 | 19765 | AI230945 | | | d |
| 751 | 6002 | AA818101 | | | b |
| 752 | 21945 | AI104132 | | | e |
| 753 | 4496 | AA892400 | | | i |
| 754 | 12921 | AI112636 | | Homo sapiens BAC clone RP11-335J18 from 2, | General |
| | | | | RIKEN cDNA 17124F2 gene, expressed | |
| | | | | sequence AI325217, uridine phosphorylase | |
| 755 | 14516 | AI013197 | | | e |
| 756 | 11504 | AI171652 | | | General |
| 757 | 3698 | AI172193 | | | e |
| 758 | 5886 | AI045807 | | | General |
| 759 | 4154 | AI009467 | | | General |
| 760 | 4330 | AA818747 | | | c, General |
| 390 | 16597 | AI102486 | | DNA segment, Chr 7, ERATO Doi 486, | General |
| | | | | expressed, EST, Weakly similar to S37583 | |
| | | | | RING finger protein rfp - mouse [M. musculus], | |
| | | | | expressed sequence AI894158, expressed | |
| | | | | sequence AW46487, hypothetical gene | |
| | | | | MGC1127 | |
| 761 | 15191 | AI176456 | | ESTs, Moderately similar to AF78844 1 hqp376 | General |
| | | | | protein [H. sapiens], expressed sequence | |
| | | | | AA49533 | |
| 762 | 10654 | AI235991 | | | f |
| 763 | 14341 | AI227596 | | | General |
| 764 | 22915 | AI228299 | | | a, c, |
| | | | | | General |
| 765 | 6638 | AI137579 | | | c, General |
| 766 | 25250 | D10706 | | | h |
| 767 | 24072 | AI231093 | | | e |
| 768 | 15628 | AI230338 | | EST AI31731, EST, Weakly similar to R3HU16 | General |
| | | | | ribosomal protein S16, cytosolic [H. sapiens], | |
| | | | | expressed sequence AA42385, ribosomal | |
| | | | | protein S16 | |
| 769 | 18831 | AI104357 | | ESTs, Weakly similar to A29861 actin gamma | c, h, |
| | | | | [H. sapiens], ESTs, Weakly similar to I39393 | General |
| | | | | alpha-actin [H. sapiens], ESTs, Weakly similar | |
| | | | | to S38782 actin beta' chain [H. sapiens], Homo | |
| | | | | sapiens mRNA; cDNA DKFZp434B2115 (from | |
| | | | | clone DKFZp434B2115), RIKEN cDNA | |
| | | | | 1752K15 gene, RIKEN cDNA 1761J2 gene, | |
| | | | | actin-like 7a, expressed sequence AL2324, | |
| | | | | expressed sequence AV259599, melanoma X- | |
| | | | | actin, uncharacterized hypothalamus protein | |
| | | | | HARP11 | |
| 770 | 8343 | AI059502 | | | i |
| 771 | 7749 | AA848804 | | ESTs, Moderately similar to 167338A | General |
| | | | | transcription factor BTF3a [H. sapiens], ESTs, | |
| | | | | Weakly similar to 167338A transcription factor | |
| | | | | BTF3a [H. sapiens], Homo sapiens cDNA | |
| | | | | FLJ14844 fis, clone PLACE1133, highly similar | |
| | | | | to TRANSCRIPTION FACTOR BTF3, RIKEN | |
| | | | | cDNA 1754E11 gene, RIKEN cDNA | |
| | | | | 4632412E9 gene, basic transcription factor 3, | |
| | | | | expressed sequence AI316863 | |
| 772 | 9984 | AA955536 | | ELL gene (11-19 lysine-rich leukemia gene), | General |
| | | | | ESTs, Weakly similar to ELL MOUSE RNA | |
| | | | | POLYMERASE II ELONGATION FACTOR ELL | |
| | | | | [M. musculus], Mus musculus, clone | |
| | | | | IMAGE: 358397, mRNA, partial cds, Mus | |
| | | | | musculus, clone MGC: 11987 IMAGE: 361737, | |
| | | | | mRNA, complete cds, eleven-nineteen lysine- | |
| | | | | rich leukemia gene, hypothetical protein | |
| | | | | FLJ2279 | |
| 773 | 17264 | D25233 | retinoblastoma 1, | ESTs, Highly similar to RB MOUSE | General |
| | | | retinoblastoma 1 | RETINOBLASTOMA-ASSOCIATED PROTEIN | |
| | | | (including osteosarcoma) | [M. musculus], retinoblastoma 1, retinoblastoma | |
| | | | | 1 (including osteosarcoma) | |
| 774 | 5356 | AI177813 | | modulator recognition factor I | General |
| 775 | 8626 | AI059449 | | | General |
| 776 | 2522 | AA964957 | | | a |
| 777 | 6291 | AI144797 | | | h |
| 642 | 19085 | AA892598 | | | General |
| 778 | 18366 | AA799442 | | | General |
| 779 | 1686 | AI179971 | hemoglobin alpha, adult | EST, Moderately similar to HART1 hemoglobin | b, General |
| | | | chain 2, hemoglobin, | alpha-1 chain - rat [R. norvegicus], ESTs, | |
| | | | alpha 1 | Moderately similar to HART1 hemoglobin alpha- | |
| | | | | 1 chain - rat [R. norvegicus], RIKEN cDNA | |
| | | | | 25142H12 gene, hemoglobin alpha, adult chain | |
| | | | | 1, hemoglobin, alpha 1, hemoglobin, alpha 2 | |
| 780 | 20004 | AI031036 | | DNA segment, Chr 3, ERATO Doi 555, | c |
| | | | | expressed, ESTs, Weakly similar to A3521 | |
| | | | | ferroxidase [R. norvegicus], ESTs, Weakly | |
| | | | | similar to CERU MOUSE CERULOPLASMIN | |
| | | | | PRECURSOR [M. musculus], ESTs, Weakly | |
| | | | | similar to KUHU ferroxidase [H. sapiens], | |
| | | | | ceruloplasmin, ceruloplasmin (ferroxidase), | |
| | | | | coagulation factor V, coagulation factor VIII, | |
| | | | | procoagulant component (hemophilia A), | |
| | | | | hephaestin | |
| 781 | 4969 | AI113008 | | | f, g, |
| | | | | | General |
| 782 | 6697 | AI045340 | | | General |
| 783 | 13420 | AA892042 | | | d, h, |
| | | | | | General |
| 784 | 21527 | AA851733 | | | f |
| 785 | 22017 | AA944209 | | ESTs, Highly similar to PROTO-ONCOGENE | General |
| | | | | SERINE/THREONINE-PROTEIN KINASE PIM- | |
| | | | | 1 [M. musculus], ESTs, Highly similar to S55333 | |
| | | | | protein kinase pim-2 [M. musculus], ESTs, | |
| | | | | Moderately similar to S55333 protein kinase | |
| | | | | pim-2 [M. musculus], Pim-1 oncogene, pim-1 | |
| | | | | oncogene, pim-2 oncogene, proviral integration | |
| | | | | site 1, serine threonine kinase pim3 | |
| 786 | 9388 | AA894173 | | | b |
| 787 | 23197 | AI172159 | | | General |
| 788 | 3518 | AA944584 | | | b, f |
| 422 | 18606 | X53504 | | EST, Moderately similar to S35531 ribosomal | e, General |
| | | | | protein L12, cytosolic [H. sapiens], EST, Weakly | |
| | | | | similar to 6S RIBOSOMAL PROTEIN L12 | |
| | | | | [R. norvegicus], hypothetical protein, ribosomal | |
| | | | | protein L12 | |
| 789 | 23123 | AA924794 | | | g, General |
| 790 | 3081 | AA999171 | signal transducer and | Signal transducer and activator of transcription | h |
| | | | activator of transcription | 3, expressed sequence AA48197, signal | |
| | | | 1, signal transducer and | transducer and activator of transcription 1, | |
| | | | activator of transcription | signal transducer and activator of transcription | |
| | | | 1, 91 kD | 1, 91 kD, signal transducer and activator of | |
| | | | | transcription 2, signal transducer and activator | |
| | | | | of transcription 3, signal transducer and | |
| | | | | activator of transcription 3 (acute-phase | |
| | | | | response factor), signal transducer and | |
| | | | | activator of transcription 4 | |
| 791 | 17358 | AI179147 | | electron-transfer-flavoprotein, beta polypeptide | e, h |
| 792 | 2435 | AI639411 | | hypothetical protein | h |
| 793 | 24651 | M83678 | | RAB13, member RAS oncogene family, RIKEN | b |
| | | | | cDNA 617N3 gene, expressed sequence | |
| | | | | AW17754 | |
| 794 | 17675 | AI137597 | | | f |
| 795 | 4407 | H33528 | | | General |
| 796 | 4874 | AA923850 | | | General |
| 797 | 16001 | AA866452 | actin, alpha, cardiac, | EST, Moderately similar to ATHUC actin, | a, b, c, g, |
| | | | actin, alpha, cardiac | cardiac muscle [H. sapiens], ESTs, Highly | General |
| | | | muscle | similar to ACTC_HUMAN ACTIN, ALPHA | |
| | | | | CARDIA [R. norvegicus], actin, alpha, cardiac, | |
| | | | | actin, alpha, cardiac muscle, smooth muscle | |
| | | | | alpha-actin | |
| 798 | 18883 | AA799992 | | | General |
| 799 | 10972 | AI233956 | | | General |
| 800 | 1114 | AI029917 | | | f |
| 801 | 15382 | AI172302 | | | General |
| 802 | 15568 | AI010257 | | | General |
| 803 | 10532 | AI009602 | | | g, General |
| 804 | 11873 | AI232326 | | | General |
| 805 | 13161 | AI138093 | | | e |
| 806 | 11485 | AI235348 | | | f |
| 807 | 25689 | X52815 | | | g, General |
| 808 | 1831 | AI071137 | | cell division cycle 25 homolog B (S. cerevisiae), | a, b, |
| | | | | cell division cycle 25 homolog C (S. cerevisiae), | General |
| | | | | cell division cycle 25B, cell division cycle 25C, | |
| | | | | expressed sequence AI64853 | |
| 809 | 25846 | AI638988 | | | General |
| 810 | 20086 | AI013260 | | | g |
| 811 | 20041 | AI112161 | | | i, General |
| 812 | 18867 | D88250 | | EST, Moderately similar to MAS2_HUMAN | a, b, |
| | | | | MANNAN-BINDING LECTIN SERINE | General |
| | | | | PROTEASE 2 PRECURSOR [H. sapiens], EST, | |
| | | | | Weakly similar to JC6554 probable serine | |
| | | | | proteinase [R. norvegicus], ESTs, Weakly | |
| | | | | similar to JC6554 probable serine proteinase | |
| | | | | [R. norvegicus], MASP-2 protein, complement | |
| | | | | component 1, r subcomponent, complement | |
| | | | | component 1, s subcomponent, mannan- | |
| | | | | binding lectin serine protease 1, mannan- | |
| | | | | binding lectin serine protease 2 | |
| 813 | 7615 | AI030163 | | | d |
| 814 | 23833 | AI113026 | | ESTs, Weakly similar to AGP2_RAT | General |
| | | | | ANGIOPOIETIN-2 (ANG-2) [R. norvegicus], | |
| | | | | angiopoietin 1, angiopoietin 2, angiopoietin-like | |
| | | | | 3, angiopoietin-like 4, angiopoietin-like factor | |
| 815 | 23731 | AA894004 | | ESTs, Highly similar to CAPG MOUSE | f, g, |
| | | | | MACROPHAGE CAPPING PROTEIN | General |
| | | | | [M. musculus], ESTs, Moderately similar to | |
| | | | | CAPG MOUSE MACROPHAGE CAPPING | |
| | | | | PROTEIN [M. musculus], RIKEN cDNA | |
| | | | | 573416F2 gene, capping protein (actin | |
| | | | | filament), gelsolin-like | |
| 816 | 21400 | M36410 | sepiapterin reductase, | | General |
| | | | sepiapterin reductase (7, 8 | | |
| | | | dihydrobiopterin: NADP+ | | |
| | | | oxidoreductase) | | |
| 817 | 20763 | AA925516 | | | b |
| 818 | 15218 | AI102495 | | RIKEN cDNA 1319I21 gene, expressed | General |
| | | | | sequence AL2431, nucleoside phosphorylase, | |
| | | | | purine-nucleoside phosphorylase | |
| 819 | 3088 | AI013369 | | | c |
| 820 | 10317 | AI172339 | | | General |
| 821 | 17468 | AA892545 | | | d |
| 822 | 23566 | AA955482 | | Mitochondrial Acyl-CoA Thioesterase, acyl- | General |
| | | | | Coenzyme A thioesterase 2, mitochondrial, acyl | |
| | | | | Coenzyme A thioesterase 3, mitochondrial | |
| 823 | 15510 | AA875428 | | | g, General |
| 824 | 17408 | AA818971 | | | h |
| 825 | 16608 | AA996840 | | | h |
| 826 | 15308 | AI072896 | | | h |
| 827 | 7397 | AI104244 | | ATP synthase, H+ transporting, mitochondrial | h |
| | | | | F1 complex, O subunit, ATP synthase, H+ | |
| | | | | transporting, mitochondrial F1 complex, O | |
| | | | | subunit (oligomycin sensitivity conferring | |
| | | | | protein), EST, Moderately similar to ATPO RAT | |
| | | | | ATP SYNTHASE OLIGOMYCIN SENSITIVITY | |
| | | | | CONFERRAL PROTEIN PRECURSOR, | |
| | | | | MITOCHONDRIAL [R. norvegicus], EST, | |
| | | | | Weakly similar to ATPO RAT ATP SYNTHASE | |
| | | | | OLIGOMYCIN SENSITIVITY CONFERRAL | |
| | | | | PROTEIN PRECURSOR, MITOCHONDRIAL | |
| | | | | [R. norvegicus], ESTs, Highly similar to | |
| | | | | ATPO_HUMAN ATP SYNTHASE | |
| | | | | OLIGOMYCIN SENSITIVITY CONFERRAL | |
| | | | | PROTEIN PRECURSOR, MITOCHONDRIAL | |
| | | | | [H. sapiens], ESTs, Moderately similar to | |
| | | | | ATPO_HUMAN ATP SYNTHASE | |
| | | | | OLIGOMYCIN SENSITIVITY CONFERRAL | |
| | | | | PROTEIN PRECURSOR, MITOCHONDRIAL | |
| | | | | [H. sapiens], Human DNA sequence from clone | |
| | | | | RP4-730D4 on chromosome 20q12 Contains a | |
| | | | | pseudogene similar to part of ATP50 (ATP | |
| | | | | synthase, H+ transporting, mitochondrial F1 | |
| | | | | complex, O subunit (oligomycin sensitivity | |
| | | | | conferring protein)), an EST, an STS and | |
| | | | | GSSs, Mus musculus adult male cerebellum | |
| | | | | cDNA, RIKEN full-length enriched library, | |
| | | | | clone: 1500031D10, full insert sequence | |
| 828 | 18542 | AA893493 | | ESTs, Highly similar to RL26_HUMAN 6S | e |
| | | | | RIBOSOMAL PROTEIN L26 [H. sapiens], | |
| | | | | ESTs, Highly similar to S33713 ribosomal | |
| | | | | protein L26, cytosolic [H. sapiens], ESTs, | |
| | | | | Weakly similar to 6S RIBOSOMAL PROTEIN | |
| | | | | L26 [R. norvegicus], ribosomal protein L26, | |
| | | | | ribosomal protein L26 pseudogene 1 | |
| 829 | 19094 | AI232021 | | ESTs, Highly similar to Human Translation | e |
| | | | | Initiation Factor Eif1, Nmr, 29 Structures | |
| | | | | [H. sapiens], RIKEN cDNA 151M16 gene, | |
| | | | | RIKEN cDNA 3111N14 gene, putative | |
| | | | | translation initiation factor, suppressor of | |
| | | | | initiator codon mutations, related sequence 1 | |
| | | | | (S. cerevisiae) | |
| 830 | 14449 | AI234152 | | | General |
| 831 | 12096 | AA819415 | | | i |
| 832 | 6135 | AA819065 | | | d |
| 833 | 21785 | AI177312 | | | g, General |
| 834 | 18454 | AI231776 | | | General |
| 835 | 21581 | AA944828 | | | c, General |
| 836 | 15383 | AA955358 | | | General |
| 837 | 16071 | AA997821 | | | General |
| 838 | 16533 | AA998174 | | | g, General |
| 839 | 5950 | AI169266 | | Homo sapiens cDNA FLJ13819 fis, clone | General |
| | | | | THYRO1452, actin related protein 2/3 complex, | |
| | | | | subunit 5 (16 kD), hypothetical protein similar to | |
| | | | | actin related protein 2/3 complex, subunit 5 | |
| 840 | 15004 | AI235224 | | EST, Moderately similar to TIM1 RAT | f, g, |
| | | | | METALLOPROTEINASE INHIBITOR 1 | General |
| | | | | PRECURSOR [R. norvegicus], EST, Weakly | |
| | | | | similar to TIM1 RAT METALLOPROTEINASE | |
| | | | | INHIBITOR 1 PRECURSOR [R. norvegicus], | |
| | | | | tissue inhibitor of metalloproteinase, tissue | |
| | | | | inhibitor of metalloproteinase 1 (erythroid | |
| | | | | potentiating activity, collagenase inhibitor) | |
| 798 | 18881 | AA799992 | | | a, General |
| 841 | 21185 | AI170056 | | | General |
| 842 | 5049 | D10655 | | ESTs, Weakly similar to ODP2 RAT | e |
| | | | | DIHYDROLIPOAMIDE | |
| | | | | ACETYLTRANSFERASE COMPONENT OF | |
| | | | | PYRUVATE DEHYDROGENASE COMPLEX | |
| | | | | [R. norvegicus], Mus musculus, clone | |
| | | | | IMAGE: 3586777, mRNA, partial cds, Pyruvate | |
| | | | | dehydrogenase complex, lipoyl-containing | |
| | | | | component X; E3-binding protein, RIKEN cDNA | |
| | | | | 1617E1 gene, RIKEN cDNA 493529O8 gene, | |
| | | | | dihydrolipoamide S-acetyltransferase (E2 | |
| | | | | component of pyruvate dehydrogenase | |
| | | | | complex), dihydrolipoamide branched chain | |
| | | | | transacylase (E2 component of branched chain | |
| | | | | keto acid dehydrogenase complex; maple syrup | |
| | | | | urine disease), dihydrolipoamide branched | |
| | | | | chain transacylase E2 | |
| 843 | 17810 | AA799778 | | ATP synthase, H+ transporting, mitochondrial | i |
| | | | | F complex, subunit b, isoform 1, ATP synthase, | |
| | | | | H+ transporting, mitochondrial F complex, | |
| | | | | subunit b, isoform 1, ESTs, Moderately similar | |
| | | | | to ATPF RAT ATP SYNTHASE B CHAIN, | |
| | | | | MITOCHONDRIAL PRECURSOR | |
| | | | | [R. norvegicus], expressed sequence C76477 | |
| 844 | 10071 | AI639058 | | chromosome 18 open reading frame 1, | i, General |
| | | | | transmembrane, prostate androgen induced | |
| | | | | RNA | |
| 845 | 2913 | AI232272 | | | General |
| 846 | 5703 | AI045136 | | | i, General |
| 847 | 3143 | AI232408 | | | General |
| 848 | 10780 | AI136555 | | DC6 protein, DKFZP564O823 protein, ESTs, | g, General |
| | | | | Weakly similar to S24169 mucin - rat | |
| | | | | [R. norvegicus], hypothetical protein FLJ13725, | |
| | | | | mucin 13, epithelial transmembrane | |
| 849 | 5357 | AI179507 | | | b, General |
| 850 | 18909 | AA849426 | | | General |
| 321 | 22696 | AA945996 | | | General |
| 851 | 9815 | AA848218 | | | General |
| 852 | 20761 | AA900331 | | | General |
| 853 | 18686 | D00729 | dodecenoyl-Coenzyme A | ESTs, Highly similar to D3D2 RAT 3,2-TRANS- | e, h |
| | | | delta isomerase (3,2 trans | ENOYL-COA ISOMERASE, MITOCHONDRIAL | |
| | | | enoyl-Coenyme A | PRECURSOR [R. norvegicus], Homo sapiens, | |
| | | | isomerase), dodecenoyl- | Similar to dodecenoyl-Coenzyme A delta | |
| | | | Coenzyme A delta | isomerase (3,2 trans-enoyl-Coenzyme A | |
| | | | isomerase (3,2 trans- | isomerase), clone MGC: 393 IMAGE: 363566, | |
| | | | enoyl-Coenzyme A | mRNA, complete cds, dodecenoyl-Coenzyme A | |
| | | | isomerase) | delta isomerase (3,2 trans.enoyl-Coenyme A | |
| | | | | isomerase), dodecenoyl-Coenzyme A delta | |
| | | | | isomerase (3,2 trans-enoyl-Coenzyme A | |
| | | | | isomerase) | |
| 854 | 2378 | AA964501 | | | d |
| 855 | 17307 | H32747 | | | h |
| 856 | 10837 | AI072144 | | | General |
| 857 | 4130 | AA800298 | | | e, f, |
| | | | | | General |
| 858 | 18529 | AI230716 | | | g, General |
| 859 | 7362 | AI029026 | | | General |
| 860 | 2730 | AI012962 | | CAAX box 1, DKFZP564B147 protein, EST, | General |
| | | | | Moderately similar to CXX1_HUMAN CAAX | |
| | | | | BOX PROTEIN 1 [H. sapiens] | |
| 861 | 21766 | AA850916 | | | General |
| 862 | 13240 | AI169311 | | | d, General |
| 863 | 12664 | AA999110 | | preferentially expressed antigen in melanoma | General |
| 864 | 24520 | L20869 | | ESTs, Highly similar to PAP1_HUMAN | General |
| | | | | PANCREATITIS-ASSOCIATED PROTEIN 1 | |
| | | | | PRECURSOR [H. sapiens], RIKEN cDNA | |
| | | | | 212L15 gene, expressed sequence AI449515, | |
| | | | | pancreatitis-associated protein, regenerating | |
| | | | | islet-derived 3 gamma | |
| 865 | 10549 | AA801255 | | | General |
| 866 | 8737 | AI071926 | | | h |
| 867 | 12674 | AI235358 | | ESTs, Moderately similar to UCR2 RAT | a, c |
| | | | | UBIQUINOL-CYTOCHROME C REDUCTASE | |
| | | | | COMPLEX CORE PROTEIN 2 PRECURSOR | |
| | | | | [R. norvegicus], RIKEN cDNA 15406 gene, | |
| | | | | ubiquinol-cytochrome c reductase core protein | |
| | | | | II | |
| 868 | 8032 | AI058398 | | | f |
| 869 | 2587 | AI232103 | | | General |
| 870 | 13547 | M63983 | hypoxanthine guanine | EST, Moderately similar to The Crystal | i |
| | | | phosphoribosyl | Structure Of Icam-2 {SUB 25-216 [H. sapiens], | |
| | | | transferase, hypoxanthine | ESTs, Weakly similar to HPRT RAT | |
| | | | phosphoribosyltransferas | HYPOXANTHINE-GUANINE | |
| | | | e 1 (Lesch-Nyhan | PHOSPHORIBOSYLTRANSFERASE | |
| | | | syndrome) | [R. norvegicus], HHGP protein, hypoxanthine | |
| | | | | guanine phosphoribosyl transferase, | |
| | | | | hypoxanthine phosphoribosyltransferase 1 | |
| | | | | (Lesch-Nyhan syndrome), intercellular | |
| | | | | adhesion molecule 2 | |
| 871 | 2135 | AI010195 | | | General |
| 872 | 6881 | AI010169 | | | General |
| 873 | 5494 | AI044425 | | | General |
| 874 | 16834 | AA963324 | | | d |
| 875 | 5699 | AI045128 | | ESTs, Highly similar to T5615 hypothetical | General |
| | | | | protein DKFZp761G1515.1 [H. sapiens], protein | |
| | | | | kinase, lysine deficient 3, serologically defined | |
| | | | | colon cancer antigen 43 | |
| 876 | 6282 | AA819523 | | | c |
| 877 | 18598 | AI070775 | | | General |
| 878 | 5297 | AI170379 | | | General |
| 879 | 7867 | AI043695 | | ESTs, Highly similar to PUR1_HUMAN | d |
| | | | | AMIDOPHOSPHORIBOSYLTRANSFERASE | |
| | | | | PRECURSOR [H. sapiens], ESTs, Moderately | |
| | | | | similar to PUR1_HUMAN | |
| | | | | AMIDOPHOSPHORIBOSYLTRANSFERASE | |
| | | | | PRECURSOR [H. sapiens], RIKEN cDNA | |
| | | | | 573454C12 gene, expressed sequence | |
| | | | | AA675351, expressed sequence C79945, | |
| | | | | glutamine fructose-6-phosphate transaminase | |
| | | | | 2, glutamine-fructose-6-phosphate | |
| | | | | transaminase 2, phosphoribosyl pyrophosphate | |
| | | | | amidotransferase | |
| 880 | 6097 | AA818929 | | | General |
| 881 | 10115 | AI058890 | | | d |
| 882 | 3738 | AA998256 | | | General |
| 883 | 9770 | AI060016 | | | General |
| 884 | 18830 | AA964496 | | ESTs, Weakly similar to A29861 actin gamma | g, h |
| | | | | [H. sapiens], ESTs, Weakly similar to I39393 | General |
| | | | | alpha-actin [H. sapiens], ESTs, Weakly similar | |
| | | | | to S38782 actin beta' chain [H. sapiens], Homo | |
| | | | | sapiens mRNA; cDNA DKFZp434B2115 (from | |
| | | | | clone DKFZp434B2115), RIKEN cDNA | |
| | | | | 1752K15 gene, RIKEN cDNA 1761J2 gene, | |
| | | | | actin-like 7a, expressed sequence AL2324, | |
| | | | | expressed sequence AV259599, melanoma X- | |
| | | | | actin, uncharacterized hypothalamus protein | |
| | | | | HARP11 | |
| 885 | 7161 | AI233407 | | | General |
| 886 | 19729 | AA818910 | | | General |
| 887 | 15524 | D13124 | | ATP synthase, H+ transporting, mitochondrial F | b |
| | | | | complex, subunit c (subunit 9) isoform 3, ATP | |
| | | | | synthase, H+ transporting, mitochondrial F | |
| | | | | complex, subunit c (subunit 9), isoform 2, | |
| | | | | ESTs, Moderately similar to AT93 MOUSE ATP | |
| | | | | SYNTHASE LIPID-BINDING PROTEIN P3 | |
| | | | | PRECURSOR [M. musculus], RIKEN cDNA | |
| | | | | 18141M8 gene | |
| 888 | 16679 | AI105268 | | | d |
| 889 | 19184 | AI178025 | | ESTs, Weakly similar to TGIF MOUSE 5′-TG-3′ | General |
| | | | | INTERACTING FACTOR [M. musculus], Homo | |
| | | | | sapiens TGF beta-induced transcription factor 2 | |
| | | | | like mRNA, partial sequence, RIKEN cDNA | |
| | | | | 54345H2 gene, RIKEN cDNA 573599O9 gene, | |
| | | | | TG interacting factor, TGFB-induced factor | |
| | | | | (TALE family homeobox), TGFB-induced factor | |
| | | | | 2 (TALE family homeobox) | |
| 890 | 6015 | AA818158 | | | f |
| 891 | 21659 | AI010584 | | ESTs, Moderately similar to S17182 interferon- | General |
| | | | | induced protein 1-8U [H. sapiens], ESTs, | |
| | | | | Weakly similar to putative haemopoietic | |
| | | | | membrane protein [M. musculus], Human DNA | |
| | | | | sequence from clone RP4-781L3 on | |
| | | | | chromosome 1p34.3-36.11 Contains a | |
| | | | | pseudogene similar to IFITM3 (interferon | |
| | | | | inducedntransmembrane protein 3 (1-8U)), | |
| | | | | STSs and GSSs, RIKEN cDNA 1114C5 gene, | |
| | | | | interferon induced transmembrane protein 3 (1- | |
| | | | | 8U), interferon induced transmembrane protein | |
| | | | | 3-like, interferon-inducible protein 16 | |
| 892 | 18612 | AI228624 | ribosomal protein L29 | EST, Moderately similar to 6S RIBOSOMAL | General |
| | | | | PROTEIN L29 [R. norvegicus], EST, Weakly | |
| | | | | similar to S65784 ribosomal protein L29, | |
| | | | | cytosolic [H. sapiens], ESTs, Highly similar to | |
| | | | | S65784 ribosomal protein L29, cytosolic | |
| | | | | [H. sapiens], ESTs, Weakly similar to 6S | |
| | | | | RIBOSOMAL PROTEIN L29 [M. musculus], | |
| | | | | Human DNA sequence from clone RP4-595K12 | |
| | | | | on chromosome 1p31.2-31.3 Contains a | |
| | | | | pseudogene similar to 6S RPL29 (ribosomal | |
| | | | | protein L29 (cell surface heparin binding protein | |
| | | | | HIP)), a chromosome 1 specific mRNA | |
| | | | | (KIAA499), a novel mRNA (KIAA433), ESTs, | |
| | | | | STSs, GSSs and a CpG Island, ribosomal | |
| | | | | protein L29 | |
| 893 | 19291 | AA963933 | | | General |
| 732 | 21583 | S77900 | | EST, Weakly similar to MOHULP myosin | c, General |
| | | | | regulatory light chain, placental [H. sapiens], | |
| | | | | ESTs, Moderately similar to MOHULP myosin | |
| | | | | regulatory light chain, placental [H. sapiens], | |
| | | | | myosin regulatory light chain, myosin, light | |
| | | | | polypeptide, regulatory, non-sarcomeric (2 kD) | |
| 894 | 7888 | AI233583 | | Homo sapiens, clone MGC: 14993 | h |
| | | | | IMAGE: 361346, mRNA, complete cds, arginyl- | |
| | | | | tRNA synthetase | |
| 895 | 21079 | AA800245 | | Mus musculus adult male stomach cDNA, | f |
| | | | | RIKEN full-length enriched library, | |
| | | | | clone: 22118M5, full insert sequence, expressed | |
| | | | | sequence AI8352, fibronectin type 3 and SPRY | |
| | | | | domain-containing protein, midline 1, midline 1 | |
| | | | | (Opitz/BBB syndrome), midline 2, ring finger | |
| | | | | protein 28 | |
| 896 | 17949 | AI011480 | | HIV-1 Rev binding protein-like, Rev/Rex | g, i |
| | | | | activation domain binding protein-related | |
| 897 | 4089 | AI180251 | | | d |
| 898 | 3823 | AI233147 | | DNA segment, Chr 17, human D6S81E 1, | General |
| | | | | ESTs, Highly similar to 533681 translation | |
| | | | | initiation factor elF-4A.I [H. sapiens], HLA-B | |
| | | | | associated transcript 1, Human clone 23933 | |
| | | | | mRNA sequence, eukaryotic translation | |
| | | | | initiation factor 4A, isoform 1, mitochondrial | |
| | | | | DEAD-box polypeptide 28, nuclear RNA | |
| | | | | helicase, DECD variant of DEAD box family | |
| 899 | 17506 | AI070068 | | growth arrest and DNA-damage-inducible 45 | General |
| | | | | beta, growth arrest and DNA-damage-inducible, | |
| | | | | alpha, growth arrest and DNA-damage- | |
| | | | | inducible, beta | |
| 900 | 21667 | AI013773 | | | General |
| 901 | 8919 | AI103388 | | ADP-ribosylation factor 6, ADP-ribosylation | g, i, |
| | | | | factor domain protein 1, 64 kD, ESTs, | General |
| | | | | Moderately similar to S39543 GTP-binding | |
| | | | | protein - mouse [M. musculus], RIKEN cDNA | |
| | | | | 23175M17 gene, RIKEN cDNA 2919I22 gene, | |
| | | | | hypothetical protein FLJ22595 | |
| 902 | 24064 | AA957480 | | | h |
| 903 | 5902 | AI045871 | | | i |
| 904 | 7913 | AI043849 | | ELL-RELATED RNA POLYMERASE II, | General |
| | | | | ELONGATION FACTOR, ESTs, Highly similar | |
| | | | | to ELL2_HUMAN RNA POLYMERASE II | |
| | | | | ELONGATION FACTOR ELL2 [H. sapiens], | |
| | | | | ESTs, Weakly similar to ELL MOUSE RNA | |
| | | | | POLYMERASE II ELONGATION FACTOR ELL | |
| | | | | [M. musculus], ESTs, Weakly similar to | |
| | | | | ELL2_HUMAN RNA POLYMERASE II | |
| | | | | ELONGATION FACTOR ELL2 [H. sapiens], | |
| | | | | Mus musculus, clone IMAGE: 358397, mRNA, | |
| | | | | partial cds, Mus musculus, clone MGC: 11987 | |
| | | | | IMAGE: 361737, mRNA, complete cds, eleven- | |
| | | | | nineteen lysine-rich leukemia gene, | |
| | | | | hypothetical protein FLJ22637 | |
| 905 | 2980 | AI177761 | | CD68 antigen, Lysosomal associated | b |
| | | | | membrane protein 1 (12 kDa), lysosomal | |
| | | | | membrane glycoprotein 1, similar to S6841 | |
| | | | | (cattle) glucose induced gene | |
| 906 | 8477 | AI179167 | | | General |
| 907 | 11203 | AA892554 | | | General |
| 908 | 22150 | AA893607 | | | General |
| 909 | 10185 | H33426 | | | g |
| 910 | 15626 | X17665 | | EST AI31731, EST, Weakly similar to R3HU16 | f, h, |
| | | | | ribosomal protein S16, cytosolic [H. sapiens], | General |
| | | | | expressed sequence AA42385, ribosomal | |
| | | | | protein S16 | |
| 911 | 2096 | AI233801 | | | h |
| 912 | 1809 | AA946503 | | | f |
| 913 | 23501 | AA955251 | | | General |
| 914 | 23927 | AA957007 | | RIKEN cDNA 615A7 gene, glutathione S- | e |
| | | | | transferase M2 (muscle), glutathione S- | |
| | | | | transferase M5, glutathione 5-transferase, mu | |
| | | | | 5, glutathione S-transferase, mu type 3 (Yb3) | |
| 915 | 6205 | AI104907 | | | e |
| 916 | 8822 | AI070158 | | | i |
| 917 | 5754 | AA850738 | | | General |
| 918 | 21822 | AI228642 | | | h |
| 919 | 19075 | AI236473 | | | General |
| 920 | 2361 | AA875512 | | ESTs, Moderately similar to E Chain E, Human | a |
| | | | | Embryonic Gower Ii Carbonmonoxy | |
| | | | | Hemoglobin {SUB 2-147 [H. sapiens], | |
| | | | | hemoglobin Z, beta-like embryonic chain, | |
| | | | | hemoglobin beta chain complex, hemoglobin, | |
| | | | | epsilon 1 | |
| 921 | 4420 | AI171916 | | | g, General |
| 922 | 3819 | AI176209 | | EST, Weakly similar to 143B_HUMAN 14-3-3 | General |
| | | | | PROTEIN BETA/ALPHA [H. sapiens], ESTs, | |
| | | | | Highly similar to A Chain A. 14-3-3 | |
| | | | | ZetaPHOSPHOPEPTIDE COMPLEX | |
| | | | | [H. sapiens], makorin, ring finger protein, 3, | |
| | | | | stratifin, tyrosine 3-monooxgenase/tryptophan 5 | |
| | | | | monooxgenase activation protein, beta | |
| | | | | polypeptide, tyrosine 3- | |
| | | | | monooxygenase/tryptophan 5-monooxygenase | |
| | | | | activation protein, zeta polypeptide | |
| 923 | 22042 | AA946476 | | | i, General |
| 924 | 3016 | AA818069 | | | a, f |
| 925 | 22487 | AI102578 | | EST, Highly similar to I49523 Mouse primary | General |
| | | | | response gene B94 mRNA, 3′end - mouse | |
| | | | | [M. musculus], Homo sapiens, clone | |
| | | | | MGC: 16332 IMAGE: 3842543, mRNA, complete | |
| | | | | cds, RIKEN cDNA 129I6 gene, RIKEN cDNA | |
| | | | | 1613K19 gene, similar to S. cerevisiae Sec6p | |
| | | | | and R. norvegicus rsec6, tumor necrosis factor, | |
| | | | | alpha-induced protein 2 | |
| 926 | 5507 | AI176584 | | | General |
| 927 | 22077 | AI177099 | | | General |
| 928 | 25386 | L37970 | | | b |
| 929 | 13930 | AA800613 | | zinc finger protein 36, zinc finger protein | General |
| | | | | homologous to Zfp-36 in mouse | |
| 930 | 11484 | AI179612 | | | General |
| 931 | 3417 | AI012337 | | ESTs, Weakly similar to NHPX RAT NHP2/RS6 | g, General |
| | | | | FAMILY PROTEIN YEL26W HOMOLOG | |
| | | | | [R. norvegicus], RIKEN cDNA 24113M7 gene, | |
| | | | | non-histone chromosome protein 2 (S. | |
| | | | | cerevisiae)-like 1, nucleolar protein family A, | |
| | | | | member 2 (H/ACA small nucleolar RNPs), | |
| | | | | sperm specific antigen 1 | |
| 932 | 14677 | AI234620 | | | c |
| 933 | 2134 | AA894212 | | | a |
| 586 | 17203 | AI171844 | | ATP synthase, H+ transporting, mitochondrial | b, e |
| | | | | F1 complex, epsilon subunit, RIKEN cDNA | |
| | | | | 24143G19 gene, expressed sequence AV645 | |
| 934 | 13291 | AI137286 | | | General |
| 935 | 22899 | AA956555 | | | General |
| 936 | 19913 | AI639155 | | | General |
| 937 | 1097 | AF016296 | | | General |
| 938 | 4594 | Y07704 | | | e, General |
| 939 | 22146 | AA893980 | | | General |
| 940 | 13382 | AI101527 | | signal recognition particle 19 kD | a, g |
| 941 | 2399 | AI030247 | | | General |
| 942 | 17644 | AA924036 | | | General |
| 943 | 895 | AI009614 | | | General |
| 944 | 1802 | AA817841 | | | c |
| 945 | 3003 | AA997330 | | | d, General |
| 946 | 9757 | AI170693 | | | c |
| 947 | 23583 | AI234819 | | | General |
| 948 | 8886 | AI233766 | | proteasome (prosome, macropain) activator | f, General |
| | | | | subunit 3 (PA28 gamma; Ki) | |
| 949 | 24185 | AA893708 | | KIAA56 gene product, KIAA144 protein | h |
| 950 | 22929 | AI071578 | | DNA segment, human D4S114, P311 protein | General |
| 951 | 18271 | AA925267 | | | e |
| 952 | 3773 | AA998356 | | B-cell CLL/lymphoma 3, molecule possessing | General |
| | | | | ankyrin repeats induced by lipopolysaccharide | |
| | | | | (MAIL), homolog of mouse, nuclear factor of | |
| | | | | kappa light polypeptide gene enhancer in B- | |
| | | | | cells inhibitor, epsilon | |
| 953 | 18108 | X62528 | | EST, Highly similar to 16527A RNase inhibitor | f |
| | | | | [H. sapiens], EST, Moderately similar to RINI | |
| | | | | RAT RIBONUCLEASE INHIBITOR | |
| | | | | [R. norvegicus], ESTs, Weakly similar to | |
| | | | | AF7418 1 MATER protein [M. musculus], | |
| | | | | expressed sequence AW546468, expressed | |
| | | | | sequence C835, ribonuclease/angiogenin | |
| | | | | inhibitor | |
| 954 | 6176 | AA819657 | | | a |
| 955 | 14250 | AA799729 | phosphodiesterase 4B, | endothelin receptor type A, phosphodiesterase | General |
| | | | cAMP specific, | 1B, Ca2+-calmodulin dependent, 63 kDa, | |
| | | | phosphodiesterase 4B, | phosphodiesterase 4B, cAMP specific, | |
| | | | cAMP-specific (dunce | phosphodiesterase 4B, cAMP-specific (dunce | |
| | | | (Drosophila)-homolog | (Drosophila)-homolog phosphodiesterase E4), | |
| | | | phosphodiesterase E4) | phosphodiesterase 8A, phosphodiesterase 8B, | |
| | | | | phosphodiesterase 9A | |
| 956 | 22948 | AI105421 | | | d |
| 957 | 10991 | AI104342 | | | b |
| 958 | 11563 | AI102560 | | | a |
| 959 | 25669 | X07314 | | | a, b |
| 960 | 9277 | AI072424 | | | i |
| 961 | 13467 | AI138034 | | UDP-glucose ceramide glucosyltransferase | General |
| 962 | 11516 | AI103962 | | | h |
| 963 | 20110 | AF071204 | | KIT ligand, kit ligand, stem cell factor KL-2 | b |
| | | | | precursor | |
| 964 | 19320 | AA891666 | melanoma antigen, family | Homo sapiens, Similar to neurofilament, heavy | i |
| | | | D, 1 | polypeptide (2 kD), clone MGC: 271 | |
| | | | | IMAGE: 463424, mRNA, complete cds, MAGE- | |
| | | | | E1 protein, MAGEF1 protein, Neurofilament, | |
| | | | | heavy polypeptide, RIKEN cDNA 2117K23 | |
| | | | | gene, RIKEN cDNA 383417A13 gene, General | |
| | | | | transcription factor IIH, polypeptide 1 (62 kD | |
| | | | | subunit), melanoma antigen, family D, 1, | |
| | | | | melanoma antigen, family D, 2, necdin, | |
| | | | | neurofilament, heavy polypeptide, | |
| | | | | neurofilament, heavy polypeptide (2 kD) | |
| 965 | 13029 | AI179391 | | | d, General |
| 966 | 10348 | AI069934 | | | e |
| 967 | 8495 | AI059971 | | Homo sapiens (clone NCD18) tumor necrosis | d, g, i, |
| | | | | factor receptor related protein mRNA, complete | General |
| | | | | exon and repeat region, lymphotoxin B | |
| | | | | receptor, lymphotoxin beta receptor (TNFR | |
| | | | | superfamily, member 3), tumor necrosis factor | |
| | | | | receptor superfamily, member 8 | |
| 968 | 14968 | K02815 | | ESTs, Moderately similar to S4363 class II | General |
| | | | | histocompatibility antigen RT1-B alpha chain | |
| | | | | precursor - rat [R. norvegicus], histocompatibility | |
| | | | | 2, O region alpha locus, major | |
| | | | | histocompatibility complex, class II, DO alpha | |
| 969 | 19358 | AI009675 | | | a, b, |
| | | | | | General |
| 970 | 4031 | AI176989 | | | a |
| 971 | 19005 | AI175875 | | | d |
| 972 | 21661 | AI176479 | | ESTs, Moderately similar to S17182 interferon- | b, f, |
| | | | | induced protein 1-8U [H. sapiens], ESTs, | General |
| | | | | Weakly similar to putative haemopoietic | |
| | | | | membrane protein [M. musculus], Human DNA | |
| | | | | sequence from clone RP4-781L3 on | |
| | | | | chromosome 1p34.3-36.11 Contains a | |
| | | | | pseudogene similar to IFITM3 (interferon | |
| | | | | inducedntransmembrane protein 3 (1-8U)), | |
| | | | | STSs and GSSs, RIKEN cDNA 1114C5 gene, | |
| | | | | interferon induced transmembrane protein 3 (1-8U), | |
| | | | | interferon induced transmembrane protein | |
| | | | | 3-like, interferon-inducible protein 16 | |
| 973 | 13596 | U90261 | | Arg/Abl-interacting protein ArgBP2, EST, | c, h |
| | | | | Weakly similar to JC5583 85K SH3 domain- | |
| | | | | containing proline-rich protein - mouse | |
| | | | | [M. musculus], ESTs, Moderately similar to | |
| | | | | T1418 SH3-containing protein p415 - rat | |
| | | | | [R. norvegicus], Homo sapiens, clone MGC: 212 | |
| | | | | IMAGE: 36777, mRNA, complete cds, Mus | |
| | | | | musculus betaPix-d mRNA, complete cds, | |
| | | | | Pak3 binding protein, RIKEN cDNA 1738J6 | |
| | | | | gene, RIKEN cDNA 2123O3 gene, SH3-domain | |
| | | | | kinase binding protein 1 | |
| 974 | 11724 | AI102812 | | | a, b, |
| | | | | | General |
| 975 | 2042 | AI101921 | | | General |
| 976 | 25632 | U75405 | | | e |
| 977 | 10227 | AI102248 | | | h, General |
| 978 | 7224 | AI009820 | | | h |
| 979 | 2131 | AI171091 | | | h |
| 980 | 20055 | AI230762 | | ESTs, Weakly similar to CALPONIN, ACIDIC | General |
| | | | | ISOFORM [R. norvegicus], Human DNA | |
| | | | | sequence from clone RP1-9E21 on | |
| | | | | chromosome 1q24-25 Contains a pseudogene | |
| | | | | similar to calponin, a novel mRNA (clone | |
| | | | | 25151), STSs, GSSs and a CpG Island, RIKEN | |
| | | | | cDNA 1614M3 gene, acidic calponin, calponin | |
| | | | | 2, calponin 3, acidic | |
| 981 | 18897 | AA875207 | hemoglobin beta chain | | d |
| | | | complex, hemoglobin, | | |
| | | | beta | | |
| 982 | 18468 | AA859966 | | Homo sapiens cDNA FLJ14666 fis, clone | General |
| | | | | NT2RP23, weakly similar to TUMOR | |
| | | | | NECROSIS FACTOR, ALPHA-INDUCED | |
| | | | | PROTEIN 1, Homo sapiens polymerase delta- | |
| | | | | interacting protein 1 mRNA, complete cds, | |
| | | | | MSTP28 protein, tumor necrosis factor, alpha- | |
| | | | | induced protein 1 (endothelial) | |
| 983 | 22820 | AA848315 | | GMPR2 for guanosine monophosphate | General |
| | | | | reductase isolog, IMP (inosine monophosphate) | |
| | | | | dehydrogenase 2, RIKEN cDNA 2314P21 | |
| | | | | gene, RIKEN cDNA 573544D12 gene, | |
| | | | | expressed sequence AA95985, guanosine | |
| | | | | monophosphate reductase, inosine 5′- | |
| | | | | phosphate dehydrogenase 2 | |
| 984 | 17901 | AA944355 | | | General |
| 985 | 8305 | AI111695 | | | a |
| 986 | 14842 | AI237724 | | | General |
| | 26167 | AI044866 | | | General |
| 987 | 10097 | AI639425 | | | f, General |
| 988 | 6861 | AI176970 | | | h |
| 989 | 18859 | AA799467 | | | g |
| 990 | 21510 | AA851620 | | | General |
| 991 | 3561 | AB020504 | | | General |
| 992 | 22898 | AA901107 | | | General |
| 993 | 14668 | AI012185 | | | c |
| 994 | 23035 | AA945712 | | | d |
| 995 | 6330 | AI170426 | | | b |
| 996 | 3808 | AI008643 | | DnaJ (Hsp4) homolog, subfamily B, member 1, | General |
| | | | | DnaJ (Hsp4) homolog, subfamily B, member | |
| | | | | 12, DnaJ (Hsp4) homolog, subfamily B, | |
| | | | | member 4, DnaJ (Hsp4) homolog, subfamily B, | |
| | | | | member 5, ESTs, Weakly similar to | |
| | | | | HS4L_HUMAN HEAT SHOCK 4 KDA | |
| | | | | PROTEIN 1 HOMOLOG [H. sapiens], RIKEN | |
| | | | | cDNA 1729A2 gene, RIKEN cDNA 2136G19 | |
| | | | | gene | |
| 997 | 10334 | AI060295 | | RAB5B, member RAS oncogene family, RIKEN | a |
| | | | | cDNA 3732413A17 gene, expressed sequence | |
| | | | | AI663973 | |
| 998 | 22762 | D89730 | | EGF-containing fibulin-like extracellular matrix | c, General |
| | | | | protein 1, EGF-containing fibulin-like | |
| | | | | extracellular matrix protein 2, EST, Weakly | |
| | | | | similar to FBL3_RAT EGF-CONTAINING | |
| | | | | FIBULIN-LIKE EXTRACELLULAR MATRIX | |
| | | | | PROTEIN 1 PRECURSOR (FIBULIN-3) (FIBL- | |
| | | | | 3) (T16 PROTEIN) [R. norvegicus], ESTs, | |
| | | | | Weakly similar to FBL3_RAT EGF- | |
| | | | | CONTAINING FIBULIN-LIKE | |
| | | | | EXTRACELLULAR MATRIX PROTEIN 1 | |
| | | | | PRECURSOR (FIBULIN-3) (FIBL-3) (T16 | |
| | | | | PROTEIN) [R. norvegicus], epidermal growth | |
| | | | | factor-containing fibulin-like extracellular matrix | |
| | | | | protein 1, epidermal growth factor-containing | |
| | | | | fibulin-like extracellular matrix protein 2 | |
| 999 | 15837 | AI010411 | | ESTs, Highly similar to 2819A set gene | g |
| | | | | [R. norvegicus], ESTs, Highly similar to I59377 | |
| | | | | template activating factor-I, splice form alpha | |
| | | | | [H. sapiens], ESTs, Highly similar to | |
| | | | | SET_HUMAN SET PROTEIN [H. sapiens], | |
| | | | | Human DNA sequence from PAC 3P2 on | |
| | | | | chromosome Xq21.1-Xq21.3. Contains set | |
| | | | | pseudogene, ESTs and STS, KIAA175 protein, | |
| | | | | NADH dehydrogenase (ubiquinone) 1, | |
| | | | | subcomplex unknown, 2 (14.5 kD, B14.5b), SET | |
| | | | | translocation, SET translocation (myeloid | |
| | | | | leukemia-associated) | |
| 1000 | 4169 | AI009669 | | RIKEN cDNA 229H22 gene, membrane- | General |
| | | | | spanning 4-domains, subfamily A, member 1, | |
| | | | | membrane-spanning 4-domains, subfamily A, | |
| | | | | member 11, membrane-spanning 4-domains, | |
| | | | | subfamily A, member 12 4-domains, subfamily | |
| | | | | A, member 7, membrane-spanning 4-domains, | |
| | | | | subfamily A, member 2 (Fc fragment of IgE, | |
| | | | | high affinity I, receptor for; beta polypeptide), | |
| | | | | membrane-spanning 4-domains, subfamily A, | |
| | | | | member 3 (hematopoietic cell-specific), | |
| | | | | membrane-spanning 4-domains, subfamily A, | |
| | | | | member 4A, membrane-spanning 4-domains, | |
| | | | | subfamily A, member 5, membrane-spanning 4- | |
| | | | | domains, subfamily A, member 6A, membrane- | |
| | | | | spanning 4-domains, subfamily A, member 8, | |
| | | | | testes development-related NYD-SP21 | |
| 1001 | 22596 | AA955298 | | | General |
| 1002 | 11483 | AF020618 | | | General |
| 1003 | 17540 | AA955914 | | EST, Highly similar to FBRL MOUSE | General |
| | | | | FIBRILLARIN [M. musculus], EST, Weakly | |
| | | | | similar to A38712 fibrillarin [H. sapiens], ESTs, | |
| | | | | Highly similar to A38712 fibrillarin [H. sapiens], | |
| | | | | ESTs, Weakly similar to FBRL MOUSE | |
| | | | | FIBRILLARIN [M. musculus], expressed | |
| | | | | sequence AL22665, fibrillarin | |
| 1004 | 26030 | M34331 | | | e |
| 1005 | 15569 | Z78279 | collagen, type I, alpha 1, | EST, Highly similar to CA1B_HUMAN | c, e |
| | | | procollagen, type I, alpha 1 | COLLAGEN ALPHA 1(XI) CHAIN | |
| | | | | PRECURSOR [H. sapiens], EST, Weakly | |
| | | | | similar to CA11_HUMAN COLLAGEN ALPHA | |
| | | | | 1(I) CHAIN PRECURSOR [H. sapiens], EST, | |
| | | | | Weakly similar to CA25_HUMAN COLLAGEN | |
| | | | | ALPHA 2(V) CHAIN PRECURSO [H. sapiens], | |
| | | | | EST, Weakly similar to CGHU1S collagen | |
| | | | | alpha 1(I) chain precursor [H. sapiens], ESTs, | |
| | | | | Weakly similar to CA11_HUMAN COLLAGEN | |
| | | | | ALPHA 1(I) CHAIN PRECURSOR [H. sapiens], | |
| | | | | Homo sapiens cDNA FLJ2845 fis, clone | |
| | | | | ADKA191, Homo sapiens mRNA for putative | |
| | | | | emu2 protein, collagen, type I, alpha 1 | |
| 1006 | 22378 | AA944212 | | | General |
| 1007 | 23155 | AA926016 | | DNA segment, Chr 7, ERATO Doi 486, | i |
| | | | | expressed, EST, Weakly similar to S37583 | |
| | | | | RING finger protein rfp - mouse [M. musculus], | |
| | | | | ESTs, Weakly similar to JE343 terf protein - rat | |
| | | | | [R. norvegicus], RING finger protein terf, | |
| | | | | expressed sequence AI894158, expressed | |
| | | | | sequence AW46487, hypothetical protein | |
| | | | | FLJ22638, hypothetical protein MGC16175, ret | |
| | | | | finger protein, ret finger protein-like 3 antisense, | |
| | | | | tripartite motif protein 11, tripartite motif protein | |
| | | | | 17 | |
| 1008 | 4832 | AA800190 | | ESTs, Moderately similar to 17149A glycogen | General |
| | | | | phosphorylase [H. sapiens], ESTs, Weakly | |
| | | | | similar to 17149A glycogen phosphorylase | |
| | | | | [H. sapiens], phosphorylase, glycogen; brain | |
| 1009 | 18774 | AI010279 | | | a, i |
| 1010 | 21798 | AA926365 | | CGI-69 protein, EST, Moderately similar to | b |
| | | | | T43493 hypothetical protein DKFZp434C119.1 | |
| | | | | [H. sapiens], mitochondrial carrier family protein, | |
| | | | | mitochondrial solute carrier | |
| 1011 | 3392 | AA998205 | | | d |
| 1012 | 9796 | AI071990 | | | General |
| 1013 | 16314 | AA859348 | | | General |
| 1014 | 2757 | AA997851 | | | c, General |
| 1015 | 4636 | AA899491 | | | i |
| 1016 | 21644 | AI179609 | | | General |
| 480 | 11727 | AA849518 | | | d |
| 1017 | 345 | AI059916 | | Signal transducer and activator of transcription | f |
| | | | | 1, signal transducer and activator of | |
| | | | | transcription 1, signal transducer and activator | |
| | | | | of transcription 1, 91 kD, signal transducer and | |
| | | | | activator of transcription 3, signal transducer | |
| | | | | and activator of transcription 3 (acute-phase | |
| | | | | response factor) | |
| 1018 | 22773 | AA859885 | | | c |
| 1019 | 2767 | AA963201 | | | General |
| 1020 | 22036 | AI070141 | | | General |
| 1021 | 8580 | AI060314 | | | c |
| 1022 | 9362 | AI102706 | | | General |
| 1023 | 10659 | AI103059 | | | General |
| 1024 | 16549 | AA892270 | | | a |
| 1025 | 2254 | AI235325 | | | h, General |
| 1026 | 12366 | AI232088 | | | General |
| 1027 | 20897 | AI175812 | | coatomer protein complex, subunit alpha, | General |
| | | | | embryonic ectoderm development | |
| 1028 | 13270 | AI228760 | | | d |
| 1029 | 12031 | AA893860 | | ESTs, Highly similar to YSHUT threonine- | General |
| | | | | tRNA ligase [H. sapiens], ESTs, Moderately | |
| | | | | similar to YSHUT threonine- tRNA ligase | |
| | | | | [H. sapiens], hypothetical protein FLJ12528, | |
| | | | | threonyl-tRNA synthetase | |
| 1030 | 16859 | AI236753 | | | General |
| 1031 | 6982 | AI170793 | | Down syndrome cell adhesion molecule, | General |
| | | | | RIKEN cDNA 212A2 gene, deleted in colorectal | |
| | | | | carcinoma, myopalladin, palladin, putative | |
| | | | | neuronal cell adhesion molecule, titin | |
| | | | | immunoglobulin domain protein (myotilin) | |
| 1032 | 15518 | AI072945 | | | General |
| 1033 | 8612 | AI058527 | | | a, b, |
| | | | | | General |
| 1034 | 14289 | AA891838 | | | b |
| 580 | 22248 | AA943537 | | ajuba, expressed sequence AI48116, | General |
| | | | | expressed sequence R75157, zyxin | |
| 1035 | 12303 | AA944786 | | | d |
| 1036 | 17632 | AI102472 | | | c |
| 1037 | 19722 | AI013508 | | | General |
| 1038 | 15051 | AI236332 | | ESTs, Weakly similar to ATDA_HUMAN | General |
| | | | | DIAMINE ACETYLTRANSFERASE | |
| | | | | [H. sapiens], RIKEN cDNA 26116A3 gene, | |
| | | | | RIKEN cDNA 49344K22 gene, | |
| | | | | spermidine/spermine N1-acetyl transferase, | |
| | | | | spermidine/spermine N1-acetyltransferase | |
| 1039 | 7273 | AI234712 | | | f |
| 1040 | 15879 | AI228313 | | | General |
| 1041 | 10020 | AI045632 | | | f, General |
| 1042 | 22432 | AI171263 | | EST, Highly similar to FBRL MOUSE | g, General |
| | | | | FIBRILLARIN [M. musculus], EST, Weakly | |
| | | | | similar to A38712 fibrillarin [H. sapiens], ESTs, | |
| | | | | Highly similar to A38712 fibrillarin [H. sapiens], | |
| | | | | ESTs, Weakly similar to FBRL MOUSE | |
| | | | | FIBRILLARIN [M. musculus], expressed | |
| | | | | sequence AL22665, fibrillarin | |
| 1043 | 25705 | X59375 | | | General |
| 1044 | 4696 | AI237009 | | | c |
| 1045 | 18673 | AA849028 | | EST, Weakly similar to SNHUC8 multicatalytic | d |
| | | | | endopeptidase complex [H. sapiens], ESTs, | |
| | | | | Highly similar to PRC8 MOUSE | |
| | | | | PROTEASOME COMPONENT C8 | |
| | | | | [M. musculus], ESTs, Weakly similar to | |
| | | | | SNHUC8 multicatalytic endopeptidase complex | |
| | | | | [H. sapiens], proteasome (prosome, macropain) | |
| | | | | subunit, alpha type 3, proteasome (prosome, | |
| | | | | macropain) subunit, alpha type, 3 | |
| 1046 | 13166 | AI178736 | | | b |
| 1047 | 24128 | AA849766 | | DKFZP586E1519 protein | c |
| 1048 | 24042 | AI230002 | | | General |
| 1049 | 9339 | AI101160 | | | General |
| 1050 | 15190 | AI102562 | | EST, Moderately similar to Cd-7 Metallothionein | General |
| | | | | 2 [H. sapiens], EST, Moderately similar to | |
| | | | | SMHU1E metallothionein 1E [H. sapiens] | General |
| 1051 | 3433 | AI030339 | | | General |
| 1052 | 4459 | AA891721 | | | General |
| 1053 | 19012 | AI172056 | | | General |
| 1054 | 2802 | D85435 | | | c |
| 1055 | 14763 | AA944481 | | ESTs, Highly similar to AGP2_RAT | General |
| | | | | ANGIOPOIETIN-2 (ANG-2) [R. norvegicus], | |
| | | | | angiopoietin 1, angiopoietin 2, angiopoietin-like | |
| | | | | 3, angiopoietin-like 4, angiopoietin-like factor | |
| 1056 | 9583 | AI071185 | | | d, General |
| 1057 | 10394 | AA943564 | | | General |
| 1058 | 16821 | AA999042 | | | General |
| 1059 | 3718 | AI229643 | | | General |
| 1060 | 8022 | AI058357 | | | General |
| 1061 | 19840 | AA899197 | | EST, Moderately similar to JH148 nucleolin - | g, General |
| | | | | rat [R. norvegicus], EST, Weakly similar to | |
| | | | | NUCL_HUMAN NUCLEOLIN [H. sapiens], | |
| | | | | ESTs, Highly similar to FUS_HUMAN RNA- | |
| | | | | BINDING PROTEIN FUS [H. sapiens], ESTs, | |
| | | | | Highly similar to PAB1_HUMAN | |
| | | | | POLYADENYLATE-BINDING PROTEIN 1 | |
| | | | | [H. sapiens], ESTs, Moderately similar to | |
| | | | | PAB1_HUMAN POLYADENYLATE-BINDING | |
| | | | | PROTEIN 1 [H. sapiens], ESTs, Moderately | |
| | | | | similar to POLYADENYLATE-BINDING | |
| | | | | PROTEIN 1 [M. musculus], Mus musculus adult | |
| | | | | male testis cDNA, RIKEN full-length enriched | |
| | | | | library, clone: 493347N23, full insert sequence, | |
| | | | | RIKEN cDNA 493272K14 gene, fusion, derived | |
| | | | | from t(12;16) malignant liposarcoma, poly A | |
| | | | | binding protein, cytoplasmic 1, poly(A)-binding | |
| | | | | protein, cytoplasmic 3, poly(A)-binding protein, | |
| | | | | cytoplasmic, pseudogene 2 | |
| 1062 | 15215 | AI060260 | | | d |
| 1063 | 8053 | AI175033 | | | General |
| 1064 | 12086 | AA801116 | | | c |
| 1065 | 21447 | AI009608 | | | d |
| 1066 | 4232 | AI012958 | | | General |
| 1067 | 12978 | X96437 | | immediate early response 3 | General |
| 1068 | 1031 | AA892863 | | | d |
| 1069 | 18682 | AI059499 | | Homo sapiens, Similar to chaperonin containing | h |
| | | | | TCP1, subunit 8 (theta), clone MGC: 1224 | |
| | | | | IMAGE: 393332, mRNA, complete cds, T- | |
| | | | | complex 1, chaperonin containing TCP1, | |
| | | | | subunit 8 (theta), chaperonin subunit 8 (theta), | |
| | | | | expressed sequence AI528772, potassium | |
| | | | | large conductance calcium-activated channel, | |
| | | | | subfamily M, beta member 3-like, t-complex 1, t- | |
| | | | | complex protein 1 | |
| 1070 | 25806 | E00898 | | | g |
| 1071 | 4432 | AI101851 | | | d |
| 1072 | 2997 | AI030545 | | | i, General |
| 1073 | 6936 | AI010593 | | | d |
| 1074 | 11684 | AI010917 | | | g, General |
| 1075 | 804 | AI169756 | | Gene 33/Mig-6, RIKEN cDNA 132F13 gene | General |
| 1076 | 15192 | AI101099 | | ESTs, Moderately similar to AF78844 1 hqp376 | General |
| | | | | protein [H. sapiens], expressed sequence | |
| | | | | AA49533 | |
| 1077 | 19145 | AA964613 | | | f |
| 1078 | 3887 | AA893307 | | | a |
| 1079 | 13539 | AI177280 | | | General |
| 1080 | 5258 | AA926089 | | DKFZP564B769 protein, ESTs, Weakly similar | d |
| | | | | to T12483 hypothetical protein | |
| | | | | DKFZp564B769.1 [H. sapiens], KIAA164 protein | |
| 1081 | 17380 | AA799612 | | ESTs, Highly similar to S17516 hypothetical | h |
| | | | | protein [H. sapiens], ESTs, Highly similar to | |
| | | | | UBIQUITIN-CONJUGATING ENZYME E2-17 | |
| | | | | KD [R. norvegicus], ESTs, Moderately similar to | |
| | | | | UBC2_HUMAN UBIQUITIN-CONJUGATING | |
| | | | | ENZYME E2-17 KD [H. sapiens], ESTs, Weakly | |
| | | | | similar to UBIQUITIN-CONJUGATING | |
| | | | | ENZYME E2-17 KD [R. norvegicus], RIKEN | |
| | | | | cDNA 26131N2 gene, ubiquitin-conjugating | |
| | | | | enzyme E2A (RAD6 homolog), ubiquitin- | |
| | | | | conjugating enzyme E2B (RAD6 homolog), | |
| | | | | ubiquitin-conjugating enzyme E2B (RAD6 | |
| | | | | homology), ubiquitin-conjugating enzyme E2C, | |
| | | | | ubiquitin-conjugating enzyme E2I, ubiquitin- | |
| | | | | conjugating enzyme E2I (homologous to yeast | |
| | | | | UBC9) | |
| 544 | 11530 | AA799773 | | EST, Moderately similar to ABP2_HUMAN | i |
| | | | | ENDOTHELIAL ACTIN-BINDING PROTEIN | |
| | | | | [H. sapiens], ESTs, Moderately similar to | |
| | | | | ABP2_HUMAN ENDOTHELIAL ACTIN- | |
| | | | | BINDING PROTEIN [H. sapiens], filamin A, | |
| | | | | alpha (actin-binding protein-28), filamin B, beta | |
| | | | | (actin-binding protein-278) | |
| 1082 | 8541 | AI112310 | | DKFZP564O92 protein, disrupter of silencing 1 | d |
| 1083 | 15876 | AA892582 | | EST, Highly similar to 6S RIBOSOMAL | e, h |
| | | | | PROTEIN L8 [R. norvegicus], EST, Moderately | |
| | | | | similar to 6S RIBOSOMAL PROTEIN L8 | |
| | | | | [R. norvegicus], EST, Weakly similar to JN923 | |
| | | | | ribosomal protein L8, cytosolic [H. sapiens], | |
| | | | | ESTs, Highly similar to 6S RIBOSOMAL | |
| | | | | PROTEIN L8 [R. norvegicus], ESTs, Highly | |
| | | | | similar to RL8_HUMAN 6S RIBOSOMAL | |
| | | | | PROTEIN L [M. musculus], ESTs, Moderately | |
| | | | | similar to RL8_HUMAN 6S RIBOSOMAL | |
| | | | | PROTEIN L [M. musculus], expressed | |
| | | | | sequence AL2498, ribosomal protein L8 | |
| 1084 | 7806 | AA818421 | | | General |
| 1085 | 19011 | AI102618 | | | General |
| 1086 | 8938 | AI070590 | | | General |
| 1087 | 13266 | AI172326 | | | General |
| 1088 | 22765 | AI176265 | | | General |
| 1089 | 22196 | U21719 | | | General |
| 1090 | 6789 | AA998207 | | | i, General |
| 1091 | 1287 | AI172299 | | | f, General |
| 1092 | 13985 | AA819429 | | | e |
| 1093 | 5887 | AI179099 | | biotinidase, vanin 1, vanin 2, vanin 3 | b |
| 1094 | 15189 | M11794 | | | General |
| 1095 | 657 | AI010262 | | colony stimulating factor 2 receptor, beta 1, low- | General |
| | | | | affinity (granulocyte-macrophage), interleukin 4 | |
| | | | | receptor, interleukin 4 receptor, alpha | |
| 1096 | 14554 | U48828 | | | f, i, |
| | | | | | General |
| 1097 | 23096 | AA924352 | | ESTs, Moderately similar to acid phosphatase | a, b |
| | | | | [H. sapiens], LPAP for lysophosphatidic acid | |
| | | | | phosphatase, acid phosphatase 6, | |
| | | | | lysophosphatidic, expressed sequence | |
| | | | | AU22842 | |
| 1098 | 7120 | AI012393 | | ESTs, Weakly similar to JE343 terf protein - rat | a, b |
| | | | | [R. norvegicus], RIKEN cDNA 4921519C19 | |
| | | | | gene, RING finger protein terf, butyrophilin, | |
| | | | | subfamily 1, member A1, expressed sequence | |
| | | | | AA41499, expressed sequence AI894158, | |
| | | | | hypothetical protein FLJ22638, hypothetical | |
| | | | | protein MGC16175, ret finger protein, ret finger | |
| | | | | protein-like 3 antisense, tripartite motif protein | |
| | | | | 11, tripartite motif protein 17 | |
| 1099 | 13033 | AI113076 | | | c |
| 1100 | 12745 | AI011799 | | | a, General |
| 1101 | 8759 | AI237646 | | | General |
| 950 | 22930 | AI071578 | | DNA segment, human D4S114, P311 protein | e |
| 1102 | 4490 | AA851184 | | cathepsin Z | General |
| 1103 | 600 | AA800222 | | | c, e |
| 779 | 1687 | AI179971 | hemoglobin alpha, adult | EST, Moderately similar to HART1 hemoglobin | a, b, |
| | | | chain 2, hemoglobin, | alpha-1 chain - rat [R. norvegicus], ESTs, | General |
| | | | alpha 1 | Moderately similar to HART1 hemoglobin alpha- | |
| | | | | 1 chain - rat [R. norvegicus], RIKEN cDNA | |
| | | | | 25142H12 gene, hemoglobin alpha, adult chain | |
| | | | | 1, hemoglobin, alpha 1, hemoglobin, alpha 2 | |
| 1104 | 23139 | AI180040 | | | d, f |
| 1105 | 11876 | AI009321 | | | General |
| 1106 | 13568 | AA800169 | | | General |
| 1107 | 25671 | X07686 | | | e |
| 1108 | 2410 | AA964589 | | | General |
| 1109 | 23230 | AI236146 | | | d |
| 766 | 15134 | D10706 | | EST, Moderately similar to I3859 hypothetical | c |
| | | | | protein [H. sapiens], EST, Weakly similar to | |
| | | | | I3859 hypothetical protein [H. sapiens], ESTs, | |
| | | | | Weakly similar to ORNITHINE | |
| | | | | DECARBOXYLASE ANTIZYME [R. norvegicus], | |
| | | | | ornithine decarboxylase antizyme, ornithine | |
| | | | | decarboxylase antizyme 1, ornithine | |
| | | | | decarboxylase antizyme 2 | |
| 1110 | 6166 | AI136516 | | | General |
| 1111 | 12066 | AA800566 | | | c |
| 684 | 17947 | AA944581 | | HIV-1 Rev binding protein-like, Rev/Rex | i |
| | | | | activation domain binding protein-related | |
| 371 | 19256 | M15562 | | expressed sequence AI323765, | f, General |
| | | | | histocompatibility 2, class II antigen E alpha, | |
| | | | | major histocompatibility complex, class II, DP | |
| | | | | alpha 2 (pseudogene), major histocompatibility | |
| | | | | complex, class II, DR alpha | |
| 1112 | 23210 | H31420 | | | h |
| 1113 | 5844 | AA944367 | | N-acetylglucosamine-phosphate mutase | General |
| 1114 | 2992 | AI171776 | | | General |
| 1115 | 8515 | AA849917 | | | a, b |
| 1116 | 21974 | AA945769 | | ESTs, Weakly similar to T43483 translation | a |
| | | | | initiation factor IF-2 homolog [H. sapiens], | |
| | | | | hypothetical protein MGC536, novel putative | |
| | | | | protein similar to YIL91C yeast hypothetical 84 | |
| | | | | kD protein from SGA1-KTR7, translation | |
| | | | | initiation factor IF2 | |
| 1117 | 11896 | AA997845 | | dual-specificity tyrosine-(Y)-phosphorylation | a |
| | | | | regulated kinase 1B, dual-specificity tyrosine- | |
| | | | | (Y)-phosphorylation regulated kinase 3, kinase | |
| | | | | interacting with leukemia-associated gene | |
| | | | | (stathmin) | |
| 1118 | 10820 | AI009411 | | EST, Moderately similar to R3RT3 ribosomal | e, General |
| | | | | protein S3 - rat [R. norvegicus], EST, Weakly | |
| | | | | similar to R3RT3 ribosomal protein S3 - rat | |
| | | | | [R. norvegicus], hypothetical protein FLJ2359, | |
| | | | | ribosomal protein S3 | |
| 1119 | 6532 | AI234105 | | | General |
| 1120 | 6274 | AA819206 | | | General |
| 1121 | 23099 | AI112365 | | RIKEN cDNA 2112C16 gene, hypothetical | General |
| | | | | protein FLJ1292, mago-nashi (Drosophila) | |
| | | | | homolog, proliferation-associated, mago-nashi | |
| | | | | homolog, proliferation-associated (Drosophila) | |
| 1122 | 12898 | AI105049 | | | General |
| 1123 | 22011 | AI176212 | | | General |
| 1124 | 14693 | AI234830 | | | General |
| 1125 | 12107 | AI172460 | | | d |
| 1126 | 3799 | AF002281 | | ESTs, Weakly similar to LIM PROTEIN CLP36 | f, General |
| | | | | [R. norvegicus], PDZ and LIM domain 1 (elfin), | |
| | | | | PDZ and LIM domain 3, PDZ-LIM protein | |
| | | | | mystique, RIKEN cDNA 1113B1 gene, Rattus | |
| | | | | norvegicus LIM-domain protein LMP-1 mRNA, | |
| | | | | complete cds, Z-band alternatively spliced PDZ- | |
| | | | | motif, alpha-actinin-2-associated LIM protein, | |
| | | | | reversion induced LIM gene | |
| 1127 | 14955 | AA945750 | | | d |
| 1128 | 14862 | AI236048 | | | f |
| 1129 | 9317 | AI029174 | | | h |
| 1130 | 24028 | AI180239 | | | General |
| 1131 | 16081 | AI179610 | heme oxygenase | heme oxygenase (decycling) 1 | General |
| | | | (decycling) 1 | | |
| 1132 | 25918 | AI639204 | | | e |
| 1133 | 15042 | AI179422 | | | General |
| 1134 | 11242 | AI179260 | | | General |
| 1135 | 18018 | D12771 | solute carrier family 25 | EST, Moderately similar to S3894 ADP, ATP | i |
| | | | (mitochondrial carrier; | carrier protein T3 [H. sapiens], EST, Weakly | |
| | | | adenine nucleotide | similar to A29132 ADP, ATP carrier protein T2 | |
| | | | translocator), member 5 | [H. sapiens], ESTs, Moderately similar to | |
| | | | | ADT2_HUMAN ADP, ATP CARRIER PROTEIN, | |
| | | | | FIBROBLAST ISOFORM [H. sapiens], Mus | |
| | | | | musculus, Similar to CG4995 gene product, | |
| | | | | clone MGC: 7958 IMAGE: 358457, mRNA, | |
| | | | | complete cds, RIKEN cDNA 136L1 gene, | |
| | | | | RIKEN cDNA 493443G12 gene, folate | |
| | | | | transporter/carrier, solute carrier family 25 | |
| | | | | (mitochondrial carrier; adenine nucleotide | |
| | | | | translocator), member 5, solute carrier family | |
| | | | | 25 (mitochondrial carrier; adenine nucleotide | |
| | | | | translocator), member 6 | |
| 1136 | 6655 | AA850688 | | | f |
| 1137 | 10182 | AI176185 | FBJ osteosarcoma | | General |
| | | | oncogene, v-fos FBJ | | |
| | | | murine osteosarcoma | | |
| | | | viral oncogene homolog | | |
| 1138 | 20990 | AI176509 | | protein kinase C, nu | i |
| 1139 | 12118 | AA892775 | lysozyme, lysozyme | EST, Weakly similar to A Chain A, Mutant | g |
| | | | (renal amyloidosis) | Human Lysozyme With Foreign N-Terminal | |
| | | | | Residues {SUB 18-148 [H. sapiens], EST, | |
| | | | | Weakly similar to LYC1 RAT LYSOZYME C, | |
| | | | | TYPE 1 PRECURSOR [R. norvegicus], ESTs, | |
| | | | | Weakly similar to A Chain A, Mutant Human | |
| | | | | Lysozyme With Foreign N-Terminal Residues | |
| | | | | {SUB 18-148 [H. sapiens], RIKEN cDNA | |
| | | | | 1738F2 gene, RIKEN cDNA 9533J23 gene, | |
| | | | | lysozyme, lysozyme (renal amyloidosis), | |
| | | | | lysozyme homolog | |
| 1140 | 4355 | AI103410 | | | General |

[0187] TABLE 4

| Compound | Time (hrs) | Model Code |
|---|---|---|
| Ifosfamide | 48, 144 | a |
| Cyclophosphamide | 48, 192 | b |
| Minoxidil | 24, 360 | c |
| Hydralazine | 6 | d |
| BI-QT | 168, 336 | e |
| Clenbuterol | 6, 24 | f |
| Isoproterenol | 3, 6, 24 | g |
| Norepinephrine | 3, 6, 24 | h |
| Epinephrine | 3, 6, 24 | I |
| General | | General |

[0188] TABLE 5
GENERAL Attorney Docket No. 44921-5090US
Document No. 1828250.1

| Identifier | NonToxMean | NonToxSD | ToxMean | ToxSD | LDA score |
|---|---|---|---|---|---|
| 8938 | 72.49846847 | 35.616941 | 32.58413333 | 33.33534129 | 70.53453453 |
| 19696 | 61.17825826 | 20.87718965 | 41.4072 | 17.99470437 | 70.3003003 |
| 16448 | 316.0752853 | 106.4032634 | 196.5678667 | 148.6244308 | 72.45645646 |
| 1638 | 170.6204204 | 45.98409061 | 125.5168 | 50.68216788 | 67.8018018 |
| 17832 | 6223.652042 | 2633.02861 | 3682.600133 | 3280.902039 | 68.69069069 |
| 5596 | 129.2716817 | 48.34165983 | 86.29226667 | 48.08313596 | 65.53153153 |
| 15056 | 26.02435435 | 16.4477125 | 12.2056 | 15.84966299 | 65.66366366 |
| 1689 | 11552.76066 | 4830.350287 | 7248.0156 | 6306.417948 | 66.13813814 |
| 14464 | 151.2832132 | 63.47873283 | 100.9436 | 65.22443435 | 66.06606607 |
| 19913 | 50.12765766 | 19.66490555 | 34.7712 | 22.36177941 | 65.66966967 |
| 7362 | 185.6274775 | 46.43226766 | 150.2716 | 47.46886886 | 67.3993994 |
| 19067 | 51.95087087 | 25.98485092 | 31.64626667 | 22.82603751 | 65.44144144 |
| 7936 | 80.7251952 | 20.87755258 | 64.16906667 | 25.68788494 | 68.57057057 |
| 21400 | 122.3365165 | 36.82117511 | 93.13653333 | 43.86216043 | 66.1021021 |
| 14299 | 53.59687688 | 14.79619568 | 43.20906667 | 14.058604 | 67.74774775 |
| 18907 | 483.0658559 | 247.056126 | 297.2048 | 251.5669094 | 65.83183183 |
| 25517 | 188.9551051 | 94.03518084 | 115.5454667 | 105.9832198 | 67.26726727 |
| 1288 | 67.87501502 | 23.54663557 | 51.23253333 | 24.83954694 | 65.03303303 |
| 23822 | 337.497988 | 140.9213721 | 236.9002667 | 143.0727342 | 67.46546547 |
| 12613 | 89.39780781 | 31.97196903 | 94.58813333 | 53.76216973 | 65.85585586 |
| 22995 | 346.6827628 | 122.2171839 | 263.3754667 | 129.50731 | 66.15015015 |
| 18366 | 97.31693694 | 24.44041591 | 81.6344 | 24.11334744 | 66.94894895 |
| 4874 | 129.3038438 | 50.3843815 | 96.86506667 | 57.67563452 | 65.73573574 |
| 10547 | 26.3566967 | 11.08758866 | 19.384 | 11.36075476 | 65.81381381 |
| 11663 | 109.3640841 | 39.98991383 | 83.52146667 | 48.6847472 | 65.15315315 |
| 23099 | 113.1338438 | 62.46411954 | 156.8176 | 48.00433316 | 68.78078078 |
| 17285 | 246.9660661 | 68.23201281 | 208.7148 | 75.2358579 | 67.2012012 |
| 20975 | 157.1995195 | 37.21790724 | 135.5798667 | 44.41549326 | 66.33633634 |
| 3615 | 296.4857958 | 139.717057 | 216.0168 | 157.8900781 | 65.73573574 |
| 25469 | 3875.094264 | 1933.847909 | 3281.065067 | 2846.942639 | 66.13813814 |
| 18400 | 37.38276276 | 13.28625502 | 32.34986667 | 16.79435664 | 65.73573574 |
| 3561 | 62.44954955 | 35.76106582 | 45.69293333 | 34.03616518 | 65.30930931 |
| 6509 | 1.827387387 | 29.44622307 | 28.80293333 | 31.81768541 | 70.87087087 |
| 9111 | 110.7656757 | 44.35117669 | 68.14826667 | 53.68408666 | 68.28828829 |
| 12462 | 135.381021 | 42.97715274 | 97.76493333 | 48.98317153 | 68.5045045 |
| 1845 | 72.01876877 | 75.85335582 | 2.699866667 | 86.41553255 | 67.43543544 |
| 8594 | 243.5170571 | 68.45132346 | 302.068 | 77.87824043 | 68.25225225 |
| 4652 | 236.917958 | 75.80952172 | 175.702 | 90.61425001 | 65.36936937 |
| 2730 | 1383.565465 | 317.1048745 | 1138.2416 | 336.7685506 | 65.63363363 |
| 8919 | 219.293994 | 50.3691595 | 258.7578667 | 67.28264037 | 67.12312312 |
| 21185 | 595.4060961 | 186.9327029 | 474.0896 | 194.2886934 | 67.73573574 |
| 1831 | 212.2755556 | 76.52515314 | 152.4144 | 105.3498365 | 69.27327327 |
| 2997 | 80.00204204 | 28.71912254 | 59.6192 | 35.59476247 | 67.40540541 |
| 18909 | 1671.732853 | 392.4116077 | 1384.6024 | 451.8576469 | 66.53453453 |
| 26167 | 134.7165165 | 47.59463132 | 126.3729333 | 81.03451486 | 65.57357357 |
| 11865 | 65.93768769 | 16.95174622 | 61.7544 | 27.42951484 | 67.33933934 |
| 1283 | 107.8844745 | 35.04454514 | 97.00293333 | 52.32959867 | 65.40540541 |
| 14842 | 111.2535736 | 38.17357051 | 101.8753333 | 56.75867104 | 68.69069069 |
| 17264 | 30.31930931 | 10.9046027 | 24.5472 | 11.79646747 | 66.9009009 |
| 16092 | 369.1881381 | 133.2415014 | 383.0384 | 197.2260892 | 65.20720721 |
| 16001 | 6956.653874 | 4429.730358 | 7700.967467 | 5339.923013 | 65.97597598 |
| 385 | 53.32657658 | 20.34513196 | 24.41373333 | 19.32565245 | 81.59159159 |
| 6166 | 352.6468168 | 103.7327299 | 247.1990667 | 126.8492915 | 65.62162162 |
| 5132 | 1110.373213 | 230.1370785 | 886.4596 | 241.8634169 | 69.63363363 |
| 15727 | 49.35342342 | 15.34697312 | 35.6312 | 15.48039719 | 68.6006006 |
| 11403 | −4.132762763 | 101.6886382 | 84.9084 | 109.9803583 | 66.55255255 |
| 4861 | 171.4952252 | 48.73056765 | 124.3810667 | 61.74762146 | 71.03903904 |
| 19282 | −42.65402402 | 87.74398555 | 28.23106667 | 110.6660663 | 67.53753754 |
| 15383 | 79.91810811 | 30.652448 | 55.4604 | 38.95519784 | 65.003003 |
| 16071 | 140.2272372 | 49.35971496 | 109.4429333 | 72.91664278 | 65.33933934 |
| 17848 | 194.3432132 | 58.06606118 | 212.2409333 | 95.04139603 | 65.14114114 |
| 15628 | 106.193964 | 53.66420537 | 72.38413333 | 59.12261967 | 66.30630631 |
| 24886 | 1398.435015 | 383.9561012 | 1510.2572 | 582.9668179 | 66.00600601 |
| 3417 | 444.3617417 | 120.8043364 | 467.0837333 | 177.560328 | 65.20720721 |
| 18456 | 237.4204805 | 102.3981852 | 224.7922667 | 142.9449073 | 65.12312312 |
| 22711 | 219.0362462 | 49.22663825 | 165.8392 | 51.01685608 | 67.65165165 |
| 23773 | 252.4870571 | 83.55121918 | 334.7781333 | 82.8740413 | 69.58558559 |
| 22697 | 464.0506607 | 145.4066285 | 294.1353333 | 193.0841828 | 69.83783784 |
| 20776 | 69.56924925 | 16.97614522 | 55.06893333 | 19.69728055 | 66.12012012 |
| 22696 | 319.6695495 | 111.2920825 | 215.6545333 | 149.7528706 | 67.55555556 |
| 11684 | 180.4317718 | 53.62509097 | 134.8041333 | 81.03253826 | 67.63963964 |
| 4154 | 192.7478979 | 68.26975549 | 218.1085333 | 125.7269822 | 66.55855856 |
| 19291 | 26.68984985 | 16.60798861 | 34.80786667 | 29.24204855 | 67.95795796 |
| 3214 | 33.65321321 | 14.5901984 | 44.16 | 15.92048791 | 65.53753754 |
| 19781 | 55.21522523 | 26.60262402 | 59.48026667 | 47.15136707 | 65.35735736 |
| 13568 | 117.4451952 | 31.74744654 | 98.47613333 | 43.88527614 | 65.95795796 |
| 24107 | 111.7821622 | 27.76698092 | 105.1286667 | 43.0198754 | 69.44144144 |
| 2399 | 54.42369369 | 18.87054417 | 60.1316 | 30.20835042 | 65.48948949 |
| 12988 | 19.73492492 | 13.43661964 | 26.04933333 | 19.45953385 | 66.54054054 |
| 8612 | 44.25837838 | 26.76734752 | 43.31693333 | 38.46574605 | 67.50750751 |
| 20073 | 46.95612613 | 18.37152689 | 24.33906667 | 21.00683603 | 69.77177177 |
| 23409 | 784.9057357 | 234.5443921 | 514.8028 | 285.4738576 | 70.12012012 |
| 23566 | 202.5740541 | 51.57262868 | 247.5364 | 59.10443706 | 69.40540541 |
| 23833 | 3.16003003 | 19.1547679 | 20.5952 | 22.24789892 | 68.13813814 |
| 1349 | 63.36246246 | 18.54507329 | 46.76426667 | 23.6663677 | 66.82282282 |
| 1571 | 171.1223724 | 44.14656407 | 192.9042667 | 83.37646024 | 70.34234234 |
| 4459 | 51.14861862 | 18.05307097 | 35.30733333 | 21.06236097 | 67.38738739 |
| 14554 | 108.7731832 | 30.90475217 | 92.1288 | 53.21609427 | 70.19219219 |
| 19255 | 249.8988288 | 94.46639357 | 172.4934667 | 136.1692967 | 68.02402402 |
| 4355 | 116.2907207 | 41.25938907 | 132.4930667 | 69.32780921 | 65.42342342 |
| 14380 | 369.6702402 | 106.6646804 | 314.9093333 | 190.0506953 | 67.95795796 |
| 18447 | 689.994955 | 154.965744 | 665.2398667 | 273.6720581 | 65.59159159 |
| 9658 | 91.44114114 | 56.37854523 | 108.8808 | 80.81962342 | 66.74474474 |
| 10394 | 127.6029429 | 33.74101819 | 144.1212 | 59.26738732 | 69.95795796 |
| 2984 | 820.9295796 | 296.6266834 | 642.7485333 | 398.8418716 | 66.55855856 |
| 23187 | 382.4496697 | 84.05252115 | 338.7626667 | 132.5344805 | 65.12312312 |
| 14651 | 22.97741742 | 11.88799972 | 35.14666667 | 13.31225358 | 68.24024024 |
| 15556 | 773.6088288 | 170.1184709 | 580.3448 | 207.3705142 | 68.13813814 |
| 15929 | 226.1643844 | 73.67163957 | 298.5917333 | 109.9870393 | 65.95795796 |
| 22378 | 258.03 | 61.21775049 | 199.0550667 | 82.91016084 | 67.20720721 |
| 14184 | 219.4502703 | 100.3089978 | 265.0389333 | 189.0891682 | 66.24024024 |
| 6568 | 113.7420721 | 37.12194787 | 112.3276 | 67.20321817 | 67.22522523 |
| 26148 | 46.32885886 | 31.16904645 | 24.33973333 | 47.28917355 | 65.20720721 |
| 3143 | 327.6772973 | 85.34914028 | 265.438 | 130.1184031 | 65.27327327 |
| 3405 | 255.8100601 | 72.91699692 | 279.1788 | 114.8346427 | 65.89189189 |
| 2135 | 113.2241441 | 48.6776077 | 128.3670667 | 102.1457422 | 68.42642643 |
| 4594 | 101.8178679 | 36.76081853 | 64.6076 | 43.38325041 | 69.15315315 |
| 17320 | 193.7527027 | 56.48179636 | 216.2656 | 109.0445704 | 67.24324324 |
| 12946 | 214.3218919 | 48.7516373 | 169.7182667 | 64.40548158 | 67.63963964 |
| 5005 | 64.97573574 | 17.07035037 | 50.6384 | 24.06437257 | 66.24024024 |
| 2587 | 128.6519219 | 49.02276069 | 138.8965333 | 86.68669157 | 65.22522523 |
| 22036 | 232.5344745 | 70.13135612 | 288.1818667 | 90.96748966 | 69.42342342 |
| 18468 | 103.6571471 | 26.34536999 | 84.50693333 | 31.75542899 | 71.20720721 |
| 22247 | 547.1983483 | 167.2471262 | 600.6785333 | 306.5840909 | 65.50750751 |
| 20204 | 48.7542042 | 13.12382882 | 38.2412 | 18.85018108 | 67.80780781 |
| 18611 | 1866.745556 | 561.2759596 | 1985.5172 | 989.2441283 | 66.94294294 |
| 6262 | 833.3602703 | 209.3539434 | 667.2974667 | 262.0166407 | 66.35435435 |
| 24310 | 300.4368769 | 92.5559206 | 292.298 | 172.1727988 | 66.39039039 |
| 9970 | 41.8290991 | 16.71326192 | 53.35293333 | 22.98860668 | 68.10810811 |
| 3391 | 65.42762763 | 23.17844683 | 73.84173333 | 38.98158947 | 65.95795796 |
| 1867 | 563.8847447 | 144.4354691 | 617.586 | 252.7746934 | 67.44144144 |
| 22762 | 43.69891892 | 18.7980068 | 38.3012 | 30.06706931 | 66.10810811 |
| 21659 | 398.0121021 | 119.1107764 | 515.552 | 146.6284508 | 68.05405405 |
| 18406 | 103.7865465 | 38.59483955 | 126.8301333 | 74.69609428 | 66.55855856 |
| 956 | 248.7113213 | 78.1677381 | 165.5565333 | 101.821794 | 70.07207207 |
| 5950 | 310.0055856 | 91.83088416 | 333.1805333 | 170.7325037 | 66.42642643 |
| 2069 | 325.0245946 | 80.5912804 | 387.7393333 | 143.8666882 | 74.49249249 |
| 23166 | 106.8232132 | 27.84324275 | 111.3249333 | 53.83331056 | 67.80780781 |
| 6059 | 133.9323724 | 37.17657273 | 119.3445333 | 63.46730525 | 68.12612613 |
| 9339 | 169.3109309 | 44.91784911 | 188.1286667 | 84.28460894 | 67.05705706 |
| 1894 | 153.4639339 | 62.86198889 | 182.2790667 | 111.1631361 | 66.69069069 |
| 6430 | 155.9801201 | 68.97035674 | 183.3576 | 110.0622628 | 67.97597598 |
| 6044 | 228.932042 | 67.60066509 | 267.0017333 | 99.42927714 | 66.64264264 |
| 2042 | 157.1421021 | 70.75267 | 179.5984 | 120.4462597 | 65.44144144 |
| 20897 | 236.3516517 | 51.74161557 | 253.342 | 85.02425018 | 65.07507508 |
| 20461 | 93.10510511 | 26.50362991 | 60.50453333 | 31.08815397 | 72.00600601 |
| 24867 | 48.31201201 | 15.52563294 | 32.08106667 | 25.64892767 | 66.32432432 |
| 17361 | 97.88654655 | 33.24848768 | 63.50213333 | 42.27341108 | 66.95495495 |
| 13023 | 39.76930931 | 17.59981107 | 55.8428 | 25.74507088 | 65.87387387 |
| 2936 | 77.56312312 | 26.66715017 | 55.54626667 | 46.81207412 | 68.40840841 |
| 12195 | 40.29054054 | 28.19399017 | 67.17093333 | 34.30477164 | 66.5045045 |
| 7308 | 173.0977477 | 52.3843028 | 186.2728 | 105.4884207 | 65.97597598 |
| 7941 | 143.4922222 | 59.61799581 | 178.7176 | 114.5027757 | 72.84084084 |
| 3965 | 1082.078468 | 215.0078492 | 885.6898667 | 264.1772007 | 65.9039039 |
| 16613 | 104.2170571 | 30.30979396 | 75.58706667 | 43.71236237 | 68.09009009 |
| 20055 | 203.1345946 | 98.95872235 | 239.5048 | 162.7233699 | 66.42642643 |
| 9984 | 53.41801802 | 18.57642971 | 60.2156 | 33.93376956 | 65.74174174 |
| 19416 | 51.55012012 | 23.65535112 | 61.37493333 | 42.65959448 | 68.66066066 |
| 23501 | 570.5681381 | 188.6893698 | 600.8397333 | 313.8877745 | 65.39339339 |
| 22873 | 218.6465165 | 69.42724004 | 242.9489333 | 126.1457279 | 66.25825826 |
| 20392 | 108.1697898 | 36.74729252 | 91.06426667 | 58.95886771 | 66.12612613 |
| 22175 | 122.7006607 | 60.73210182 | 146.3976 | 102.685777 | 65.82582583 |
| 21644 | 42.73414414 | 20.02239798 | 27.44893333 | 27.65488167 | 66.02402402 |
| 12609 | 233.4871171 | 60.64644968 | 251.8496 | 101.0000546 | 65.97597598 |
| 11561 | 64.27129129 | 26.06807716 | 74.09653333 | 42.81586396 | 67.07507508 |
| 12364 | 167.1453453 | 34.88732627 | 180.3305333 | 101.9126453 | 67.11111111 |
| 6684 | 46.39993994 | 17.61944269 | 23.29093333 | 18.45816242 | 73.88588589 |
| 15088 | 234.1487087 | 50.98531943 | 298.5472 | 66.90284801 | 67.78978979 |
| 22042 | 80.95408408 | 64.01668998 | 134.0318667 | 71.90333572 | 70.96096096 |
| 10780 | 170.215015 | 52.15528635 | 216.1777333 | 103.2157802 | 70.06006006 |
| 13310 | 263.6483183 | 84.94409905 | 335.0121333 | 163.1743769 | 71.37537538 |
| 5867 | 125.3911411 | 28.71252609 | 153.1288 | 49.53867263 | 67.89189189 |
| 895 | 52.09792793 | 31.27119755 | 61.64933333 | 63.07948599 | 66.64264264 |
| 25765 | 69.91843844 | 15.25861986 | 53.73533333 | 20.65170364 | 70.30630631 |
| 8626 | 50.23366366 | 26.43575146 | 73.9184 | 40.96692697 | 65.37537538 |
| 20684 | 151.0114114 | 31.00777899 | 119.2346667 | 43.21294705 | 65.63963964 |
| 16546 | 274.2533333 | 69.74767882 | 201.9084 | 88.68051698 | 69.47147147 |
| 17903 | 136.4756156 | 43.38108814 | 154.49 | 81.74623287 | 65.60960961 |
| 20229 | 77.35189189 | 23.10267263 | 54.49306667 | 32.50505615 | 65.35735736 |
| 1687 | 5403.358649 | 1841.285364 | 3390.540933 | 2737.843207 | 69.29129129 |
| 9362 | 196.7336637 | 42.60975263 | 155.3865333 | 61.28247745 | 67.65765766 |
| 1097 | 291.0685886 | 93.99259964 | 205.6634667 | 145.7332274 | 69.30930931 |
| 22820 | 418.5933934 | 90.02872862 | 482.8748 | 142.1782873 | 65.22522523 |
| 22212 | 34.41504505 | 15.89632599 | 43.12893333 | 27.91798454 | 65.90990991 |
| 22146 | 78.36675676 | 27.69105018 | 53.51706667 | 38.33774334 | 67.63963964 |
| 22077 | 143.718018 | 57.69355684 | 155.6457333 | 99.80830983 | 65.05705706 |
| 8707 | 196.0183784 | 48.34247102 | 207.6557333 | 89.02444141 | 66.09009009 |
| 7681 | 78.76585586 | 32.16112279 | 91.39706667 | 50.62460284 | 66.12612613 |
| 8888 | 61.45741742 | 24.54918629 | 31.1132 | 35.73105445 | 70.54054054 |
| 18109 | 156.0742042 | 55.81778773 | 218.1410667 | 77.47029568 | 66.69069069 |
| 3982 | 268.0332132 | 75.24003617 | 183.6764 | 89.5029389 | 69.40540541 |
| 14737 | 216.4417718 | 57.2904164 | 276.9370667 | 85.0585165 | 65.07507508 |
| 20041 | 162.7117117 | 66.1931698 | 204.4074667 | 136.2028514 | 67.30930931 |
| 23963 | 50.19213213 | 27.25661616 | 72.6608 | 34.91346924 | 66.94294294 |
| 23015 | 76.28105105 | 21.35348484 | 84.84493333 | 42.91649851 | 66.06006006 |
| 12695 | 3.236666667 | 31.83601273 | 33.17786667 | 47.92099541 | 66.55855856 |
| 6697 | 72.20354354 | 25.83488711 | 97.43946667 | 34.27944486 | 66.09009009 |
| 8886 | 149.2603003 | 27.11847144 | 162.3432 | 53.10939425 | 69.07507508 |
| 21391 | 182.8798198 | 62.3648526 | 232.0578667 | 106.4582716 | 67.82582583 |
| 22544 | 96.31168168 | 45.91951934 | 99.76533333 | 82.65850379 | 65.24324324 |
| 5886 | 105.5642342 | 43.68595668 | 123.5329333 | 80.96381669 | 68.10810811 |
| 4093 | 761.2472372 | 171.2305171 | 753.6394667 | 320.9534796 | 65.87387387 |
| 19722 | 105.7899099 | 43.47888541 | 102.1081333 | 76.9549177 | 66.12612613 |
| 13772 | 831.1903303 | 186.4790627 | 832.472 | 347.4316136 | 65.07507508 |
| 6638 | 170.9305405 | 46.16586712 | 153.616 | 81.14338217 | 65.74174174 |
| 8230 | 64.91228228 | 22.10574191 | 64.138 | 40.92817014 | 65.14114114 |
| 16130 | 4786.742523 | 2836.481592 | 5484.7164 | 3926.112296 | 65.69369369 |
| 4790 | 173.9938438 | 84.09043096 | 428.1037333 | 790.0992435 | 65.0990991 |
| 15840 | 44.64630631 | 14.56553354 | 49.0236 | 55.86485158 | 65.42942943 |
| 21671 | 40.08372372 | 19.31257365 | 57.3588 | 54.19357641 | 65.1951952 |
| 10227 | 887.740991 | 218.0449747 | 580.4258667 | 314.355664 | 71.57357357 |
| 24028 | 400.1148048 | 104.0176495 | 256.5913333 | 152.1790505 | 66.77477477 |
| 19050 | 131.9762763 | 27.51290769 | 100.1389333 | 53.45738077 | 65.45945946 |
| 22487 | 18.75924925 | 11.45640602 | 31.10826667 | 18.85726968 | 66.79279279 |
| 3773 | 25.65585586 | 25.17539957 | 46.98506667 | 37.82222125 | 66.37837838 |
| 1159 | 114.0870871 | 32.96098549 | 75.41066667 | 40.31298622 | 70.95495495 |
| 5507 | 1321.152042 | 406.4159467 | 862.4322667 | 485.470829 | 68.13813814 |
| 15299 | 94.47942943 | 57.73406292 | 114.3178667 | 92.88693964 | 67.14714715 |
| 18569 | 1244.146697 | 488.8296588 | 1342.794267 | 1047.069388 | 68.44444444 |
| 23197 | 242.457027 | 65.24136019 | 168.2028 | 83.99489168 | 68.88888889 |
| 18272 | 88.60597598 | 50.87240463 | 110.8405333 | 93.53148608 | 66.29429429 |
| 20891 | 112.2740841 | 43.6111356 | 163.6264 | 66.8717327 | 68.54054054 |
| 20743 | 156.6083483 | 23.13382173 | 127.0229333 | 38.72581832 | 73.89189189 |
| 18887 | 193.9248348 | 38.32142815 | 153.4470667 | 56.84990586 | 71.50750751 |
| 4098 | 118.7078979 | 56.06679909 | 151.8290667 | 105.6281798 | 72.81081081 |
| 17644 | 473.8572072 | 88.11026526 | 382.0854667 | 151.7742492 | 65.89189189 |
| 2852 | 468.4916216 | 156.8990485 | 296.9326667 | 204.4010076 | 66.73873874 |
| 5351 | 805.1087087 | 183.5458093 | 780.6014667 | 374.2614004 | 65.39339339 |
| 5754 | 311.9932132 | 90.10901524 | 379.9041333 | 150.3765953 | 67.24324324 |
| 15218 | 446.0465766 | 118.9354806 | 469.6905333 | 233.6035158 | 65.30930931 |
| 17226 | 193.6157658 | 41.20808929 | 184.2581333 | 77.60555747 | 65.45945946 |
| 11387 | 65.62636637 | 19.53063089 | 48.0472 | 29.83941582 | 68.39039039 |
| 12898 | 1155.093604 | 326.9983162 | 920.6853333 | 556.14818 | 71.80780781 |
| 13266 | 88.83081081 | 34.14338586 | 125.1286667 | 96.18356271 | 67.77777778 |
| 22415 | 169.1916517 | 71.9805775 | 208.9908 | 154.7452282 | 65.4954955 |
| 1714 | 190.2463664 | 42.14693723 | 128.7704 | 61.18700552 | 76.12612613 |
| 7760 | 332.0363363 | 68.75841865 | 237.5545333 | 123.2838632 | 68.70870871 |
| 12664 | 100.1887087 | 31.55464398 | 58.20906667 | 49.64866227 | 66.54054054 |
| 17541 | 75.40276276 | 35.37305084 | 92.49773333 | 79.29429139 | 67.09309309 |
| 11714 | 688.3123724 | 141.9171508 | 511.8988 | 252.9565028 | 70.57657658 |
| 12752 | 18.40444444 | 9.926800286 | 29.5148 | 17.2954324 | 66.64264264 |
| 1218 | 70.99513514 | 23.00948946 | 48.79626667 | 44.46786686 | 65.30930931 |
| 4420 | 459.2146847 | 102.7069783 | 336.7681333 | 147.9624508 | 69.29129129 |
| 1287 | 642.0570571 | 156.8171393 | 458.5782667 | 226.0114284 | 70.17417417 |
| 4832 | 820.3085586 | 203.9557534 | 592.4816 | 268.1038956 | 66.97297297 |
| 1324 | 540.7645045 | 102.5052955 | 431.7101333 | 168.4053971 | 65.29129129 |
| 21660 | 1799.216336 | 582.415201 | 2101.294 | 1096.999967 | 70.52852853 |
| 16756 | 124.3146246 | 31.85423172 | 158.2822667 | 42.44045487 | 72.92492492 |
| 13539 | 74.31735736 | 27.19784127 | 88.31293333 | 53.87132795 | 66.57657658 |
| 3959 | 386.8933934 | 90.70995601 | 439.0906667 | 188.144252 | 68.94294294 |
| 13647 | 546.5458559 | 171.8763562 | 657.4113333 | 297.5909747 | 67.47747748 |
| 21510 | 412.0168468 | 117.3257767 | 392.8604 | 249.6312061 | 66.25825826 |
| 11724 | 117.5545045 | 49.09806535 | 64.2108 | 77.37112397 | 68.32432432 |
| 13336 | 363.4029129 | 111.7914019 | 247.1030667 | 179.801567 | 69.14114114 |
| 18278 | 3944.232192 | 998.8950354 | 2938.5136 | 1271.568221 | 65.85585586 |
| 7580 | 252.0656456 | 66.83673414 | 269.3414667 | 139.1313757 | 67.82582583 |
| 12274 | 118.6513213 | 43.99173734 | 76.60813333 | 69.01666727 | 65.50750751 |
| 4161 | 50.6696997 | 14.21036004 | 54.3908 | 26.64655319 | 67.09309309 |
| 11375 | 99.21636637 | 32.90484725 | 72.73453333 | 50.20147194 | 66.24024024 |
| 20038 | 196.8626126 | 54.36882244 | 161.6828 | 92.5331668 | 66.32432432 |
| 11205 | 384.3533333 | 106.3089306 | 318.15 | 166.5292475 | 65.35735736 |
| 23217 | 808.4991592 | 239.5294339 | 640.1121333 | 363.4106742 | 65.20720721 |
| 5844 | 33.20618619 | 18.54011387 | 42.9916 | 53.24256923 | 65.11111111 |
| 9770 | 46.44246246 | 19.92613955 | 59.5272 | 50.94862942 | 67.26126126 |
| 3207 | 253.0190991 | 79.66059119 | 133.1012 | 106.1880748 | 73.65765766 |
| 23033 | 536.1412613 | 107.4224838 | 393.7129333 | 195.3626471 | 67.99399399 |
| 15935 | 81.22621622 | 16.48918158 | 57.27653333 | 22.94097229 | 69.57357357 |
| 18581 | 215.9942042 | 55.20408872 | 269.8570667 | 123.1063629 | 67.90990991 |
| 14337 | 322.3194294 | 53.66143193 | 257.1765333 | 104.3393465 | 66.72672673 |
| 22691 | 1075.303183 | 228.9954085 | 784.5778667 | 424.8754518 | 69.17717718 |
| 10878 | 1385.995916 | 414.8758472 | 1866.4344 | 799.5945004 | 66.42642643 |
| 5356 | −5.118978979 | 21.00136767 | 22.42866667 | 35.86063261 | 66.85885886 |
| 8861 | 29.17072072 | 22.80576141 | 51.44973333 | 49.9321422 | 65.45945946 |
| 10097 | 124.147988 | 26.54127344 | 93.0952 | 47.52408514 | 67.07507508 |
| 3822 | 673.761982 | 186.9080741 | 872.1389333 | 350.816601 | 65.00900901 |
| 15568 | 246.6630631 | 83.93584731 | 297.0686667 | 191.9541491 | 69.84384384 |
| 16597 | 658.9440541 | 130.1613616 | 494.0310667 | 195.673027 | 68.54054054 |
| 21785 | 90.4812012 | 32.50010122 | 110.3524 | 67.21918687 | 66.51051051 |
| 14458 | 41.40780781 | 24.65869776 | 63.26986667 | 47.78168971 | 68.64264264 |
| 14397 | 66.74069069 | 45.47819109 | 118.4668 | 67.8647496 | 65.20720721 |
| 11504 | 544.7894294 | 138.227504 | 406.5510667 | 256.3281666 | 68.04204204 |
| 20582 | 473.1648348 | 82.13508879 | 386.0477333 | 141.7973162 | 67.24324324 |
| 25846 | 78.24933934 | 23.01624996 | 51.4856 | 35.68920123 | 65.14114114 |
| 15786 | 92.55792793 | 39.70677047 | 133.7984 | 64.20978712 | 69.82582583 |
| 20915 | 361.9305706 | 78.9856249 | 280.1098667 | 131.5644921 | 65.30930931 |
| 4710 | 138.5577477 | 40.89817673 | 145.0194667 | 87.66842411 | 65.45945946 |
| 18726 | 117.1451351 | 35.4755811 | 91.67053333 | 63.49358782 | 66.42642643 |
| 9353 | 179.7312012 | 43.05211274 | 133.356 | 62.74557773 | 66.02402402 |
| 18454 | 77.9424024 | 21.87075514 | 84.30893333 | 45.96557092 | 67.82582583 |
| 7749 | 1094.882583 | 214.8318019 | 1330.865067 | 358.0804114 | 73.09309309 |
| 19379 | 369.4203303 | 68.83430484 | 388.168 | 141.7341057 | 66.12612613 |
| 6632 | 118.8854655 | 42.29574415 | 139.8264 | 86.79784998 | 65.30930931 |
| 23596 | 319.7261261 | 76.98365859 | 257.4506667 | 138.4931514 | 65.00900901 |
| 17101 | 402.5251952 | 84.47841158 | 358.5670667 | 168.1087789 | 66.04204204 |
| 17901 | 306.0611712 | 61.0008545 | 354.7029333 | 111.765356 | 69.15915916 |
| 5458 | 152.2901201 | 57.22131483 | 202.6198667 | 101.1782236 | 69.89189189 |
| 11218 | 123.8714715 | 39.88322913 | 85.18106667 | 66.39136006 | 66.62462462 |
| 5703 | 186.4057357 | 57.53155348 | 215.8356 | 110.3789575 | 66.12612613 |
| 5969 | 447.1866967 | 131.1009133 | 443.3448 | 238.403989 | 65.90990991 |
| 14256 | 281.3109309 | 55.06653776 | 309.9438667 | 100.9660491 | 65.30930931 |
| 21583 | 378.1696697 | 104.8760736 | 296.7974667 | 186.0371966 | 69.59159159 |
| 13966 | 95.99645646 | 29.92445819 | 103.2432 | 57.73805872 | 65.59159159 |
| 15281 | 121.7892492 | 31.12274069 | 127.6637333 | 61.30898267 | 66.92492492 |
| 15879 | 203.2204805 | 53.26954563 | 193.0226667 | 97.94002102 | 66.85885886 |
| 20839 | 1313.201411 | 381.4093254 | 1380.0756 | 720.1580309 | 66.21021021 |
| 958 | 116.6435736 | 35.88540631 | 90.49386667 | 51.75431641 | 65.20720721 |
| 16847 | 968.6696396 | 266.3889987 | 1007.937333 | 502.0256491 | 65.00900901 |
| 6562 | 83.82294294 | 22.0288454 | 69.6552 | 35.19942849 | 66.51051051 |
| 23854 | 639.7981982 | 186.0579446 | 1106.001067 | 835.6522508 | 66.78078078 |
| 6431 | 85.04474474 | 33.9730999 | 112.5750667 | 88.16570698 | 66.22822823 |
| 1439 | 263.1485586 | 44.01928161 | 206.8229333 | 97.34968891 | 65.62762763 |
| 8495 | 119.0903604 | 32.55673471 | 165.8949333 | 64.95183826 | 70.66066066 |
| 1754 | 185.4703604 | 46.72545297 | 120.4281333 | 56.61101972 | 73.85585586 |
| 19298 | 311.8326126 | 101.6730563 | 432.0438667 | 159.034197 | 68.22822823 |
| 20983 | 430.2093994 | 86.98985623 | 324.0536 | 160.9977404 | 66.57657658 |
| 15708 | −2.214954955 | 17.56851948 | 21.55906667 | 29.04976049 | 68.12612613 |
| 11738 | 309.9483183 | 60.96372833 | 254.6993333 | 128.5746206 | 65.39339339 |
| 25730 | 216.6359159 | 52.68303932 | 220.2433333 | 124.4837884 | 68.87687688 |
| 16721 | 416.0622222 | 85.01057014 | 336.1954667 | 146.7998256 | 66.14414414 |
| 4222 | 862.0381682 | 176.5955454 | 841.7009333 | 394.791692 | 65.11111111 |
| 23978 | 161.4975075 | 32.00206436 | 124.3706667 | 60.97444 | 69.22522523 |
| 22248 | 377.2372372 | 120.7632366 | 484.9410667 | 239.3602421 | 65.90990991 |
| 17948 | 104.0551652 | 43.81607287 | 158.1704 | 73.64095512 | 68.70870871 |
| 1760 | 188.8481081 | 39.96338126 | 143.2396 | 56.35055556 | 66.77477477 |
| 22011 | 73.38075075 | 21.79957488 | 95.94973333 | 34.24838903 | 65.39339339 |
| 18800 | 50.7418018 | 28.55545096 | 75.78813333 | 54.26756691 | 65.60960961 |
| 16596 | 304.4108408 | 85.19455004 | 207.3538667 | 135.8143346 | 67.22522523 |
| 22596 | 61.19957958 | 21.32527899 | 69.88026667 | 43.86778542 | 66.52852853 |
| 21661 | 1069.555405 | 352.3216968 | 1334.385067 | 717.4373056 | 74.14414414 |
| 23270 | 157.5835135 | 49.86066962 | 189.7304 | 110.3524169 | 67.90990991 |
| 18612 | 101.4829429 | 29.32672384 | 110.9098667 | 60.75506965 | 65.39339339 |
| 14968 | 266.143003 | 78.1768716 | 182.1364 | 125.6208288 | 67.45945946 |
| 17329 | 309.0369369 | 106.691949 | 348.3042667 | 228.0234129 | 66.79279279 |
| 15558 | 262.0998198 | 56.66623661 | 250.9046667 | 117.1831148 | 66.79279279 |
| 23464 | 160.2329129 | 44.51031583 | 195.8149333 | 81.59754346 | 67.67567568 |
| 16918 | 1413.133213 | 460.8671011 | 1629.528533 | 964.4253086 | 67.59159159 |
| 17394 | 317.0911712 | 90.98244545 | 362.8506667 | 173.2022245 | 70.57657658 |
| 18313 | 2157.747387 | 789.8817749 | 2653.856667 | 1515.939988 | 74.81081081 |
| 11039 | 503.3321021 | 157.1580278 | 481.8897333 | 308.5116227 | 65.74174174 |
| 22150 | 156.7123123 | 42.50597598 | 161.4842667 | 85.18488354 | 68.77477477 |
| 12639 | 1460.773393 | 444.0930486 | 1532.136267 | 827.6481876 | 65.84384384 |
| 22552 | 452.1078979 | 128.6560655 | 397.0625333 | 223.6136537 | 65.72372372 |
| 18713 | 213.5248048 | 45.86269132 | 316.8322667 | 181.996688 | 66.0960961 |
| 6217 | 49.97828829 | 17.40052541 | 70.66093333 | 60.18859693 | 68.22822823 |
| 11484 | 43.83453453 | 33.19740784 | 98.62786667 | 90.02330089 | 65.57957958 |
| 22898 | 81.10201201 | 32.79572472 | 122.5690667 | 102.3056384 | 68.82882883 |
| 6789 | 472.1047748 | 73.2765577 | 396.8628 | 231.7026096 | 67.26126126 |
| 19086 | 76.89486486 | 21.62493249 | 94.3248 | 62.04318693 | 68.52852853 |
| 4232 | 177.7873273 | 83.58675137 | 201.4142667 | 182.0039652 | 65.44744745 |
| 24520 | 56.30951952 | 29.47547907 | 75.4008 | 68.456624 | 66.46246246 |
| 13029 | 196.834024 | 70.15560213 | 267.1646667 | 203.5623949 | 73.04504505 |
| 24237 | 217.5224324 | 82.75251167 | 302.9657333 | 199.4963587 | 65.47747748 |
| 17847 | 1113.351321 | 201.1117315 | 812.0026667 | 380.90747 | 68.51051051 |
| 25567 | 77.7403003 | 27.1627134 | 93.72613333 | 72.91970052 | 67.56156156 |
| 15510 | 272.4407808 | 55.22298509 | 200.1338667 | 99.88071575 | 67.17717718 |
| 11876 | 62.22171171 | 19.88087401 | 72.2732 | 47.79009971 | 66.21021021 |
| 13467 | 51.40810811 | 25.57745758 | 81.73026667 | 41.97561251 | 67.45945946 |
| 4130 | 249.0733634 | 69.7014771 | 158.9117333 | 109.0187202 | 67.95795796 |
| 7414 | 283.2390991 | 52.04591174 | 327.2016 | 105.3800878 | 67.09309309 |
| 2555 | 54.72588589 | 21.23393369 | 64.0644 | 46.62585561 | 70.74474474 |
| 10020 | 100.8382583 | 47.24575942 | 135.8046667 | 70.65937512 | 66.0960961 |
| 14185 | 436.7817417 | 182.2642932 | 549.93 | 410.4846216 | 68.62462462 |
| 22877 | 64.27474474 | 20.36443332 | 86.88 | 33.84910454 | 66.10810811 |
| 6532 | 474.2814414 | 113.5953258 | 580.0912 | 242.3604877 | 69.45945946 |
| 20313 | 35.65138138 | 14.1217306 | 20.53386667 | 19.15284637 | 67.97597598 |
| 1435 | 846.9484985 | 157.1005438 | 908.9862667 | 348.3857446 | 67.02702703 |
| 18744 | 101.0285285 | 27.59011635 | 108.8517333 | 62.28678176 | 68.55855856 |
| 8212 | 461.3372673 | 118.7607732 | 517.1966667 | 237.3930463 | 67.69369369 |
| 2913 | 723.989039 | 143.8207512 | 640.2332 | 269.3334688 | 65.00900901 |
| 21311 | 173.7901201 | 38.25513248 | 175.5097333 | 80.92387205 | 68.19219219 |
| 3278 | 83.38897898 | 34.32457211 | 172.1812 | 217.7508072 | 67.44744745 |
| 23276 | 864.8205706 | 125.0984636 | 866.9262667 | 382.9781801 | 66.44444444 |
| 19710 | 50.87462462 | 21.10533047 | 74.98946667 | 44.87698519 | 67.34534535 |
| 10532 | 57.90630631 | 19.90646746 | 87.9208 | 39.20180911 | 69.11111111 |
| 18797 | 95.17507508 | 48.29428804 | 156.7506667 | 96.37476132 | 65.90990991 |
| 20735 | 109.1551952 | 37.54872752 | 142.3949333 | 84.04939678 | 68.21021021 |
| 15277 | 757.2586486 | 119.9808792 | 772.7332 | 288.8291533 | 65.75975976 |
| 1686 | 115.4446847 | 148.2121685 | 126.2946667 | 331.9836149 | 67.32732733 |
| 20056 | 160.4448949 | 27.21506574 | 126.5577333 | 51.13005332 | 67.14114114 |
| 8597 | 157.2614114 | 34.24367592 | 183.6321333 | 76.66422264 | 69.00900901 |
| 24375 | 100.4056456 | 31.10670046 | 119.3706667 | 65.09911537 | 70.89489489 |
| 19069 | 402.5671772 | 120.7772574 | 499.0681333 | 256.026845 | 67.90990991 |
| 9815 | 78.68213213 | 21.46012066 | 74.7772 | 45.70091798 | 66.06006006 |
| 15365 | 1052.608979 | 246.8184515 | 1075.352133 | 560.3357167 | 67.60960961 |
| 6097 | 10.70741742 | 19.10787732 | 30.47386667 | 31.40837855 | 65.89189189 |
| 3819 | 184.0441742 | 53.0645961 | 189.8553333 | 116.8066017 | 67.54354354 |
| 4330 | 499.2403604 | 146.4246876 | 445.0722667 | 325.0491692 | 70.34234234 |
| 22796 | 40.27414414 | 17.36701142 | 58.12186667 | 29.99494889 | 67.37537538 |
| 19256 | 418.5910511 | 122.8042598 | 305.5228 | 209.8678472 | 72.66066066 |
| 23523 | 185.5400901 | 50.98658976 | 199.4593333 | 101.4936327 | 68.72672673 |
| 25689 | 1086.230781 | 330.8253231 | 1171.6916 | 684.1791479 | 69.37537538 |
| 8665 | 372.092973 | 137.4462761 | 624.3146667 | 937.9525293 | 67.38138138 |
| 23538 | 61.26486486 | 25.00630833 | 138.8268 | 167.9882378 | 65.08108108 |
| 15867 | 39.75294294 | 27.36145508 | 78.18026667 | 129.9322765 | 68.4984985 |
| 2153 | 211.6812312 | 59.63630688 | 333.5897333 | 329.2563808 | 65.5975976 |
| 21351 | 15.94681682 | 17.28550647 | 52.00893333 | 75.78061318 | 65.36336336 |
| 5357 | 23.81036036 | 13.3662107 | 45.72693333 | 55.65476952 | 66.54654655 |
| 4626 | 30.00354354 | 26.99813854 | 76.3696 | 88.61559315 | 67.51351351 |
| 3905 | 99.72459459 | 59.91890871 | 203.3474667 | 170.4065695 | 66.97897898 |
| 3808 | 492.6752553 | 142.0629658 | 603.0476 | 412.3249868 | 65.72972973 |
| 20193 | 11.44021021 | 14.63339473 | 31.99226667 | 27.42250706 | 66.56456456 |
| 19031 | 226.5542042 | 80.71764495 | 316.426 | 261.0315285 | 69.64564565 |
| 11203 | 48.56756757 | 15.08008286 | 70.0172 | 38.56319302 | 67.11111111 |
| 4490 | 72.03528529 | 74.96309352 | 158.0234667 | 146.7958664 | 65.72972973 |
| 16859 | 82.11129129 | 31.38637404 | 115.0214667 | 85.19712603 | 66.89489489 |
| 15518 | 363.7106907 | 72.93920813 | 316.3657333 | 200.8114001 | 69.34534535 |
| 5550 | 20.18411411 | 12.63553326 | 38.39026667 | 27.0406112 | 66.66066066 |
| 14989 | 637.2671471 | 135.4981746 | 654.208 | 329.2529091 | 68.82882883 |
| 22899 | 37.78258258 | 29.93899336 | 56.64346667 | 65.64725464 | 69.72972973 |
| 1514 | 219.8367568 | 52.39364439 | 221.7862667 | 127.4380644 | 65.84384384 |
| 3437 | 100.6198198 | 26.50625625 | 129.4196 | 63.31158428 | 72.14414414 |
| 22017 | 170.6417417 | 151.2467146 | 328.8046667 | 203.913878 | 67.71171171 |
| 8494 | 468.2971772 | 92.6200257 | 451.1066667 | 237.8252614 | 68.29429429 |
| 6743 | 1114.827808 | 214.5651039 | 921.2714667 | 440.2561661 | 65.11111111 |
| 5227 | 134.3546547 | 45.77664557 | 174.9353333 | 104.6009944 | 76.96096096 |
| 2767 | 32.35042042 | 36.14976138 | 45.7332 | 81.02978982 | 67.62762763 |
| 24783 | 147.3642342 | 35.36879761 | 112.6877333 | 56.06313294 | 65.7957958 |
| 14693 | 17.43990991 | 13.55657195 | 29.88053333 | 29.68700712 | 70.87687688 |
| 22915 | 128.6723123 | 32.54275983 | 143.9506667 | 69.03744709 | 66.51051051 |
| 2254 | 191.3588288 | 40.96615757 | 191.9765333 | 95.34089695 | 65.39339339 |
| 22689 | 17.02327327 | 10.95011976 | 26.6544 | 21.30223001 | 65.39339339 |
| 3014 | 224.8988288 | 56.86046275 | 155.4037333 | 104.1163236 | 73.45945946 |
| 2242 | 175.0172673 | 84.92653403 | 219.9044 | 174.5829997 | 69.26126126 |
| 11152 | 189.5948649 | 59.08901035 | 224.5426667 | 128.3708172 | 70.51051051 |
| 14117 | 1323.556096 | 231.1844794 | 1069.146933 | 350.1422127 | 66.40840841 |
| 8829 | 256.9392192 | 64.59833933 | 273.9869333 | 136.6482686 | 65.67567568 |
| 24042 | 110.1422523 | 35.33224916 | 122.708 | 74.49565322 | 69.60960961 |
| 19840 | 1389.296787 | 364.2648838 | 1418.3772 | 705.7096386 | 68.66066066 |
| 17107 | 3085.335195 | 786.4229829 | 3162.925067 | 1656.771851 | 65.90990991 |
| 3431 | 521.6373874 | 133.7542256 | 587.462 | 279.2035761 | 69.37537538 |
| 6100 | 1733.87003 | 500.8862283 | 1813.900533 | 971.1778472 | 68.04204204 |
| 4169 | 15.23216216 | 13.79962699 | 65.66466667 | 101.0717607 | 65.53153153 |
| 20761 | 40.35207207 | 22.88404336 | 74.42493333 | 75.27113246 | 65.42942943 |
| 8053 | 158.3908408 | 52.38168912 | 147.4453333 | 176.0430097 | 67.42942943 |
| 8314 | 37.74684685 | 20.62061151 | 65.18866667 | 60.69449107 | 70.91291291 |
| 13251 | 24.79555556 | 21.39480435 | 56.8832 | 48.20654526 | 67.71171171 |
| 19057 | 37.59798799 | 26.6987731 | 82.2904 | 45.74180362 | 71.84384384 |
| 18598 | 2.265165165 | 31.0457142 | 46.36 | 62.19549621 | 66.96096096 |
| 22681 | 290.1493994 | 74.02188774 | 341.2553333 | 196.8692173 | 67.90990991 |
| 5699 | 474.8620721 | 82.83755107 | 392.5314667 | 205.7781669 | 69.69369369 |
| 4944 | 97.85765766 | 33.05505292 | 129.9089333 | 73.44437126 | 70.07807808 |
| 18654 | 225.9345946 | 55.31875281 | 143.4742667 | 91.96906131 | 71.60960961 |
| 1748 | 13.15117117 | 11.26802396 | 24.1972 | 19.76149618 | 66.31231231 |
| 19723 | 110.8291592 | 44.46587867 | 143.9182667 | 89.66412878 | 66.74474474 |
| 11644 | 240.3689189 | 68.04134468 | 292.4717333 | 164.2458978 | 71.62762763 |
| 17100 | 1169.730811 | 269.2963014 | 1181.04 | 640.0103416 | 65.54354354 |
| 15642 | 244.0573273 | 64.24334959 | 314.7402667 | 102.3420021 | 65.15915916 |
| 8085 | 90.8796997 | 37.21612484 | 111.6589333 | 73.75941522 | 66.42642643 |
| 2341 | 214.7996096 | 62.77279195 | 228.1268 | 132.5745965 | 67.22522523 |
| 19544 | 877.0103003 | 207.0008993 | 914.8142667 | 413.8674842 | 65.59159159 |
| 24246 | 259.5653754 | 78.38332337 | 280.1245333 | 151.6943832 | 69.24324324 |
| 7471 | 174.3034535 | 51.22798503 | 433.0494667 | 531.6293255 | 67.91591592 |
| 24634 | 16.77540541 | 9.943729554 | 50.93453333 | 70.34485769 | 65.23123123 |
| 355 | 6.891771772 | 22.87156702 | 42.36933333 | 53.61521026 | 66.58258258 |
| 23165 | 143.0078679 | 41.53384915 | 207.1412 | 158.8961956 | 65.06306306 |
| 14341 | 13.8921021 | 17.44846007 | 26.80346667 | 67.66345777 | 65.57957958 |
| 18715 | 141.1687688 | 34.79869736 | 205.4153333 | 113.6473079 | 66.24624625 |
| 12366 | 41.18138138 | 16.18910839 | 70.5228 | 48.94326441 | 66.91291291 |
| 13646 | 539.8878378 | 151.4244238 | 779.5981333 | 361.1897058 | 66.46246246 |
| 21592 | 124.7615015 | 30.49860974 | 130.6713333 | 83.57220176 | 68.16216216 |
| 23964 | 78.86081081 | 26.59131706 | 124.9181333 | 53.47287058 | 72.81081081 |
| 18472 | 62.04138138 | 37.28023736 | 117.0882667 | 75.31753547 | 68.81081081 |
| 18507 | 526.0994595 | 129.9778234 | 680.3916 | 353.5398787 | 73.86186186 |
| 3433 | 847.1170571 | 407.7572204 | 1110.959467 | 924.250964 | 66.76276276 |
| 20944 | 395.7508108 | 65.89399347 | 402.8101333 | 182.7794632 | 65.47747748 |
| 14449 | 61.24468468 | 23.25839512 | 61.46186667 | 62.81005197 | 65.11111111 |
| 13929 | 104.2424925 | 41.66084094 | 145.694 | 84.57514859 | 71.06306306 |
| 18172 | 49.80393393 | 24.91031155 | 87.37426667 | 36.14079316 | 75.37537538 |
| 3669 | 26.48882883 | 18.05107279 | 29.7056 | 42.38183504 | 72.84684685 |
| 21975 | 171.0662462 | 55.4224825 | 227.5046667 | 130.6607994 | 76.01201201 |
| 3191 | 158.8891892 | 42.30405855 | 215.4716 | 68.50071702 | 67.52552553 |
| 15197 | 339.3753453 | 66.52029366 | 250.0181333 | 118.6375288 | 67.90990991 |
| 18217 | 124.8142042 | 42.23932068 | 138.7856 | 104.7169781 | 65.47747748 |
| 6172 | 21.8966967 | 10.84468475 | 18.30253333 | 25.61298552 | 65.47747748 |
| 9059 | 261.9566066 | 69.08379794 | 360.6361333 | 155.8157674 | 79.75975976 |
| 5193 | 1921.493814 | 375.9558746 | 1838.5492 | 938.8969967 | 66.87687688 |
| 19012 | 415.4101201 | 102.7400568 | 488.3222667 | 259.8339431 | 69.90990991 |
| 10972 | 179.3564865 | 58.78370918 | 255.3004 | 95.32119822 | 66.94294294 |
| 6274 | 356.3527327 | 70.55438269 | 394.8405333 | 170.0040819 | 67.54354354 |
| 20998 | 284.8785586 | 61.87358479 | 297.0229333 | 145.2585479 | 65.30930931 |
| 21816 | 256.1336937 | 58.5825438 | 269.8497333 | 132.1272928 | 66.21021021 |
| 2093 | 329.9577477 | 84.7105984 | 295.9622667 | 192.1529976 | 69.24324324 |
| 5622 | 201.8865465 | 54.07644043 | 215.5912 | 115.800727 | 65.17717718 |
| 18529 | 298.7122222 | 72.59347086 | 330.1838667 | 167.9640031 | 70.19219219 |
| 815 | 1294.80985 | 372.9112118 | 1445.012 | 797.6685248 | 67.54354354 |
| 12031 | 81.85009009 | 17.57488942 | 83.30773333 | 37.36427512 | 66.49249249 |
| 10549 | 20.88075075 | 9.268948244 | 51.72626667 | 49.07283376 | 67.2972973 |
| 19949 | 84.83585586 | 19.03876357 | 124.9334667 | 86.01204607 | 66.76276276 |
| 19729 | 98.26867868 | 41.10355435 | 141.7825333 | 164.3693855 | 66.46246246 |
| 22958 | 222.3516216 | 61.89665476 | 332.0626667 | 184.4991397 | 67.21321321 |
| 22196 | 53.36306306 | 18.57336843 | 48.3064 | 63.37479253 | 67.42942943 |
| 16080 | 11.52768769 | 28.05513739 | 48.91493333 | 54.81379034 | 66.93093093 |
| 22675 | 34.77126126 | 17.78391381 | 66.09426667 | 39.38159792 | 71.86186186 |
| 3817 | 170.7467267 | 54.41675831 | 253.9452 | 129.9122613 | 66.52852853 |
| 20868 | 56.04309309 | 26.6401069 | 97.7992 | 50.53188746 | 65.77777778 |
| 21632 | 199.0260961 | 70.73366374 | 277.3632 | 210.302496 | 72.52852853 |
| 5228 | 13.29966967 | 35.9860809 | 68.88893333 | 73.81005446 | 66.29429429 |
| 18695 | 33.05660661 | 35.62163487 | 87.28466667 | 75.91128948 | 65.90990991 |
| 23998 | 33.52453453 | 15.11942669 | 51.97706667 | 30.27439391 | 65.17717718 |
| 16394 | 799.7536336 | 252.3122848 | 919.6201333 | 622.9247718 | 68.96096096 |
| 2539 | 16.97189189 | 24.0247802 | 44.98853333 | 40.59096733 | 68.14414414 |
| 4407 | 78.10762763 | 19.73747997 | 79.0836 | 49.63701438 | 68.64264264 |
| 18473 | 214.0645946 | 63.96883025 | 268.3337333 | 138.6580163 | 69.77777778 |
| 17563 | 1512.565075 | 336.0712844 | 1552.276933 | 788.9080025 | 67.99399399 |
| 3430 | 113.1247748 | 24.63319195 | 120.2838667 | 55.86774387 | 70.51051051 |
| 15626 | 1559.982192 | 392.9104244 | 1587.424667 | 857.0575602 | 65.00900901 |
| 12921 | 193.4437838 | 64.18669085 | 210.2042667 | 123.8728695 | 67.17717718 |
| 18883 | 65.9106006 | 19.09173712 | 346.6489333 | 638.9246984 | 65.0990991 |
| 19075 | 112.8835736 | 29.19877566 | 190.2618667 | 134.2096951 | 65.12912913 |
| 18881 | 19.10243243 | 7.86572788 | 38.22826667 | 36.0712046 | 67.51351351 |
| 24272 | 9.686756757 | 22.75875573 | 53.3452 | 100.2345994 | 66.54654655 |
| 1893 | 331.2993994 | 138.696175 | 619.7997333 | 519.3306369 | 65.51351351 |
| 6438 | 27.83207207 | 12.16784973 | 49.74013333 | 41.92384442 | 65.27927928 |
| 7168 | −1.737027027 | 19.39544478 | 31.3912 | 55.21211843 | 66.0960961 |
| 15192 | 60.8587988 | 29.37339287 | 111.5484 | 79.91181268 | 67.94594595 |
| 5186 | 58.5721021 | 24.67471847 | 105.746 | 64.30219504 | 69.7957958 |
| 15841 | 45.80051051 | 15.16607716 | 71.3828 | 34.35511629 | 69.71171171 |
| 10659 | 119.6529129 | 40.63333371 | 180.052 | 95.89034622 | 65.11111111 |
| 8012 | 23.92666667 | 12.31341219 | 43.68653333 | 30.44973938 | 71.71171171 |
| 23123 | 291.002042 | 75.85347746 | 415.2902667 | 174.8884898 | 68.44444444 |
| 3823 | 367.4383483 | 77.89555445 | 473.9110667 | 191.4850628 | 65.56156156 |
| 5461 | 107.45003 | 35.26438695 | 152.7890667 | 85.66813767 | 67.04504505 |
| 13005 | 20.45213213 | 9.025723211 | 32.71026667 | 21.01691423 | 65.11111111 |
| 9796 | 3.506786787 | 12.46437314 | 24.92586667 | 22.49725167 | 70.96096096 |
| 18867 | 175.3500601 | 45.30841723 | 206.2506667 | 124.9503735 | 66.31231231 |
| 3941 | 162.8698198 | 50.68034573 | 252.2224 | 109.5806157 | 73.1951952 |
| 6585 | 671.153994 | 331.4712674 | 993.8865333 | 751.7989804 | 69.12912913 |
| 18389 | 686.5324925 | 327.0174426 | 1031.984133 | 716.273277 | 65.4954955 |
| 3799 | 347.6641742 | 84.61977436 | 421.5834667 | 235.3294566 | 73.71171171 |
| 17 | 102.115015 | 51.55145585 | 118.8796 | 142.6167557 | 68.37837838 |
| 23732 | 283.160991 | 120.5760896 | 363.3473333 | 280.470972 | 67.87987988 |
| 8022 | 11.01855856 | 20.97671253 | 36.92493333 | 41.91849093 | 66.82882883 |
| 3434 | 782.4078679 | 306.6851584 | 974.8838667 | 741.4375723 | 66.16216216 |
| 18831 | 2653.003964 | 594.2303789 | 2892.579333 | 1600.98895 | 69.84384384 |
| 15729 | 29.23543544 | 20.71589737 | 1.493333333 | 32.22650862 | 65.02702703 |
| 8058 | 313.8185285 | 63.47764541 | 320.8578667 | 155.8802739 | 66.14414414 |
| 18606 | 755.4990991 | 177.0235611 | 787.5954667 | 439.0702126 | 70.29429429 |
| 23612 | 135.0208408 | 35.35749654 | 148.7529333 | 85.93640724 | 66.06006006 |
| 5482 | 298.6487688 | 69.44419707 | 207.0368 | 124.5076928 | 70.06006006 |
| 23645 | 85.75402402 | 23.20623619 | 102.6801333 | 50.55266546 | 70.51051051 |
| 7913 | 38.34870871 | 24.32239025 | 87.43133333 | 106.9607276 | 65.98198198 |
| 12978 | 74.58318318 | 19.9642456 | 118.052 | 122.2691474 | 67.96396396 |
| 3718 | 27.41858859 | 10.36874312 | 61.1336 | 47.50227834 | 71.36336336 |
| 10837 | 72.48654655 | 25.13861801 | 110.2788 | 107.4329066 | 66.46246246 |
| 21682 | −19.73867868 | 23.16892194 | 26.7004 | 68.44642538 | 68.82882883 |
| 19658 | 8.038738739 | 13.08811047 | 28.9032 | 36.72423098 | 65.94594595 |
| 2310 | 34.66915916 | 34.32976119 | 84.04733333 | 108.9209867 | 65.34534535 |
| 12583 | 25.53441441 | 10.87954672 | 43.09533333 | 25.2762214 | 65.12912913 |
| 16168 | 183.7095495 | 39.71588486 | 223.3278667 | 116.8093091 | 67.42942943 |
| 17950 | 39.89375375 | 17.03772996 | 62.28813333 | 44.1986732 | 71.06306306 |
| 21667 | 25.55798799 | 16.28610574 | 54.18893333 | 38.98081703 | 71.84384384 |
| 11483 | 105.6160961 | 33.39285637 | 140.626 | 92.63212292 | 69.1951952 |
| 21766 | 102.3873874 | 30.78764276 | 154.6985333 | 60.50836756 | 68.51051051 |
| 17485 | 37.34957958 | 18.51871628 | 41.9596 | 55.13918699 | 66.74474474 |
| 6548 | 223.351982 | 64.71562964 | 309.3073333 | 182.737113 | 71.34534535 |
| 16136 | 111.0614114 | 38.38598665 | 168.1841333 | 92.55572117 | 67.62762763 |
| 23013 | 312.8023423 | 67.22989834 | 314.1472 | 191.3850765 | 68.74474474 |
| 11708 | 656.2660961 | 100.9917709 | 672.7158667 | 295.123462 | 66.29429429 |
| 23583 | 55.02069069 | 15.34138636 | 67.3188 | 41.45032967 | 68.66066066 |
| 21581 | 574.5948649 | 100.9941053 | 585.4786667 | 247.833259 | 65.71171171 |
| 21709 | 251.0371772 | 46.08494762 | 304.7734667 | 105.6013574 | 72.37837838 |
| 23731 | 156.557988 | 34.90185251 | 178.8264 | 93.8952906 | 74.59459459 |
| 21443 | 211.1505105 | 55.24450794 | 252.3273333 | 130.5721587 | 69.47747748 |
| 10820 | 2016.868679 | 394.8495465 | 2134.5488 | 916.5400649 | 66.42642643 |
| 6226 | 180.9392192 | 56.11190149 | 208.4389333 | 126.2274074 | 67.69369369 |
| 6881 | 187.4048048 | 36.38697325 | 541.9369333 | 770.4809513 | 67.6996997 |
| 15540 | 50.16471471 | 19.80763612 | 125.0138667 | 146.3339 | 67.81381381 |
| 16053 | 104.7786486 | 40.36047993 | 203.0978667 | 222.8617765 | 65.38138138 |
| 11258 | 9.338348348 | 12.8288048 | 46.81333333 | 66.06550364 | 65.21321321 |
| 6102 | 34.6881982 | 14.54131359 | 67.62853333 | 59.94280266 | 65.06306306 |
| 2992 | 32.3545045 | 14.84118742 | 72.47946667 | 60.57864843 | 69.57957958 |
| 16312 | 62.09135135 | 18.03624356 | 105.7618667 | 84.27319098 | 73.72972973 |
| 21579 | 89.67822823 | 30.10965619 | 156.6705333 | 114.2049362 | 66.46246246 |
| 21514 | 51.22918919 | 17.14684899 | 86.27786667 | 58.87843485 | 66.6966967 |
| 13619 | 126.2540541 | 35.20172348 | 165.5262667 | 129.0628828 | 66.97897898 |
| 7161 | 37.29990991 | 14.33737399 | 64.94226667 | 34.29983416 | 66.61261261 |
| 2410 | 17.10996997 | 9.41125795 | 24.29386667 | 32.68288621 | 70.18018018 |
| 7806 | 32.89921922 | 12.13507758 | 51.75133333 | 33.42676074 | 66.31231231 |
| 20035 | 160.8397898 | 51.06549667 | 231.2181333 | 153.5927743 | 71.94594595 |
| 16 | 1215.400871 | 271.7923445 | 1738.301333 | 669.9464909 | 71.1951952 |
| 18095 | 851.0671171 | 114.9507612 | 826.31 | 360.5139865 | 69.27927928 |
| 21165 | 26.14231231 | 19.68375564 | 62.034 | 45.32615008 | 69.11111111 |
| 23632 | 117.9095495 | 35.38523686 | 145.4554667 | 107.2681995 | 68.46246246 |
| 20869 | 65.51135135 | 31.29957449 | 121.7910667 | 62.82875419 | 70.37837838 |
| 24040 | 367.1426426 | 108.9136658 | 462.4882667 | 299.6696857 | 70.31231231 |
| 2706 | 445.8896396 | 93.42872356 | 418.4548 | 256.4528316 | 68.82882883 |
| 13460 | 339.8782282 | 58.70581576 | 244.3704 | 90.92216048 | 71.30930931 |
| 17540 | 338.986006 | 101.9061709 | 406.9857333 | 274.3575698 | 71.04504505 |
| 2757 | 855.6433033 | 177.028321 | 1118.036 | 404.6706488 | 70.14414414 |
| 2742 | 77.8221021 | 60.84443291 | −2.269733333 | 113.8540968 | 69.24324324 |
| 16982 | 1.248288288 | 13.68589859 | 124.3068 | 417.5962153 | 67.76576577 |
| 24716 | −9.734984985 | 7.656839278 | 29.73813333 | 81.36529343 | 65.68168168 |
| 9452 | 222.9467267 | 74.4629772 | 544.6782667 | 684.875271 | 68.28228228 |
| 356 | 32.46015015 | 31.50629355 | 134.3224 | 195.0399764 | 69.5975976 |
| 17506 | 37.83588589 | 22.00037604 | 118.3630667 | 122.8476271 | 70.41441441 |
| 22626 | 68.76153153 | 29.2925403 | 144.0328 | 125.3132555 | 66.1981982 |
| 23005 | 78.15855856 | 30.11948205 | 158.4333333 | 155.1551272 | 69.2972973 |
| 15300 | 219.4616517 | 88.68064613 | 311.8266667 | 287.0270087 | 69.68168168 |
| 17734 | 820.2270571 | 276.7461649 | 1276.288267 | 898.5903168 | 70.91291291 |
| 24235 | 184.918018 | 49.36407201 | 273.1097333 | 144.2502354 | 66.46246246 |
| 2741 | 28.07504505 | 16.06701889 | 47.6888 | 39.7256073 | 65.66366366 |
| 16314 | 47.75924925 | 46.46160475 | 119.6102667 | 83.53206694 | 72.03003003 |
| 5494 | 47.25780781 | 24.4794228 | 55.16266667 | 76.43192798 | 65.34534535 |
| 7299 | 224.0332733 | 96.06234119 | 400.7057333 | 225.7313284 | 68.59459459 |
| 23044 | 224.0903604 | 40.57434413 | 241.4468 | 121.4169255 | 65.86186186 |
| 16821 | 737.4866967 | 122.45802 | 776.4358667 | 364.0221538 | 66.66066066 |
| 15185 | 836.8953754 | 182.6575292 | 876.6856 | 449.6124882 | 66.96096096 |
| 15283 | 304.6465165 | 59.01860559 | 335.8565333 | 134.6477232 | 71.30930931 |
| 17104 | 533.3456156 | 140.8351573 | 579.2497333 | 305.4651559 | 66.29429429 |
| 5675 | 126.4663664 | 44.91054543 | 313.3089333 | 357.5454003 | 67.68168168 |
| 11873 | 136.426997 | 52.38531024 | 295.0414667 | 330.1990618 | 66.1981982 |
| 22765 | 19.95795796 | 9.841589035 | 49.7652 | 48.36528961 | 66.54654655 |
| 17161 | 196.9924625 | 63.30941186 | 344.6728 | 305.35076 | 69.5975976 |
| 2629 | 21.25555556 | 9.303175262 | 35.06306667 | 45.76494903 | 68.03003003 |
| 11531 | 347.5362763 | 125.6397047 | 546.3824 | 512.2328472 | 68.41441441 |
| 10182 | 14.42633634 | 45.39196964 | 99.80266667 | 141.6511343 | 65.44744745 |
| 5297 | 208.922012 | 59.24907417 | 321.2946667 | 201.7556369 | 68.18018018 |
| 22667 | 49.03594595 | 33.93458508 | 123.0734667 | 105.981439 | 66.24624625 |
| 21239 | 106.1072072 | 43.32188757 | 180.5274667 | 121.9250473 | 68.61261261 |
| 18349 | 171.9368769 | 41.29067474 | 215.8301333 | 142.6442584 | 68.82882883 |
| 3003 | 49.46108108 | 48.66360051 | 113.7446667 | 117.8949655 | 65.64564565 |
| 18830 | 3900.264985 | 802.5740391 | 4205.326133 | 2430.213531 | 67.26126126 |
| 14250 | 150.0712012 | 40.36395039 | 164.3112 | 114.6934595 | 66.52852853 |
| 16215 | 215.1935736 | 46.06168644 | 201.6325333 | 109.0627132 | 65.1951952 |
| 23578 | 302.91997 | 69.08516771 | 321.9876 | 155.9602644 | 67.77777778 |
| 3738 | 207.3542943 | 57.37567983 | 226.4605333 | 130.4036913 | 65.02702703 |
| 16081 | 81.31096096 | 37.49730539 | 417.8996 | 776.3912064 | 68.58258258 |
| 567 | 8.786756757 | 19.6043637 | 119.8282667 | 194.0106893 | 66.43243243 |
| 6982 | 9.056966967 | 12.04326158 | 84.65053333 | 136.9829322 | 68.1981982 |
| 8759 | 29.31588589 | 30.75732946 | 117.6049333 | 149.3627949 | 67.01501502 |
| 15382 | 40.64624625 | 27.64454786 | 130.1093333 | 138.4893887 | 68.18018018 |
| 15212 | 48.23750751 | 21.91906398 | 102.0592 | 92.55491027 | 66.26426426 |
| 12581 | 40.43765766 | 14.53283175 | 76.5044 | 64.68039423 | 69.21321321 |
| 15301 | 86.80627628 | 47.38871887 | 143.158 | 166.8604371 | 73.31531532 |
| 11242 | 29.36057057 | 16.46344227 | 59.1448 | 57.52839734 | 69.42942943 |
| 17735 | 872.2572072 | 315.0601774 | 1495.168667 | 967.1088715 | 68.01201201 |
| 20433 | 63.74864865 | 21.11187056 | 93.78546667 | 72.70130138 | 74.84684685 |
| 9424 | 294.5164565 | 73.42587321 | 375.1704 | 261.9582482 | 69.27927928 |
| 1609 | 752.904024 | 207.8298617 | 910.3266667 | 706.5647674 | 65.12912913 |
| 21841 | 363.3037237 | 98.73789477 | 431.2704 | 274.1229162 | 66.51051051 |
| 19011 | 558.6072072 | 112.2070055 | 604.9225333 | 312.0176449 | 69.1951952 |
| 13420 | 394.5314114 | 82.81294506 | 420.2732 | 237.3869261 | 66.89489489 |
| 19085 | 54.89846847 | 12.86081694 | 60.8328 | 34.85106767 | 69.11111111 |
| 11849 | 839.1966967 | 180.5114352 | 877.4672 | 435.6222224 | 66.31231231 |
| 25705 | 330.1517117 | 76.02852844 | 373.9126667 | 179.3556642 | 71.71171171 |
| 23471 | 68.07546547 | 27.22670055 | 350.3384 | 553.0776103 | 69.3993994 |
| 20449 | 77.32024024 | 56.32117764 | 261.8505333 | 376.7640297 | 67.23123123 |
| 23626 | 52.57429429 | 23.49905084 | 131.8013333 | 133.2193841 | 68.11411411 |
| 11114 | 31.76129129 | 15.33633558 | 81.476 | 83.14401664 | 70.26426426 |
| 5384 | 39.72459459 | 30.39866325 | 108.9032 | 122.9407092 | 67.23123123 |
| 357 | 23.45963964 | 10.14080555 | 42.20293333 | 47.2347585 | 67.57957958 |
| 21683 | 47.01618619 | 17.95548224 | 87.94773333 | 74.53349783 | 68.91291291 |
| 4491 | 41.94915916 | 25.39221348 | 46.314 | 95.16841592 | 67.66366366 |
| 22197 | 120.2223123 | 36.70029871 | 189.3146667 | 92.40831407 | 70.21021021 |
| 11153 | 416.2181682 | 95.50995272 | 466.0797333 | 254.846382 | 68.96096096 |
| 11208 | 330.6584685 | 103.4859949 | 400.4674667 | 249.141563 | 70.24624625 |
| 25379 | 185.6321021 | 40.4422624 | 201.9674667 | 102.7164965 | 66.14414414 |
| 19358 | 2787.216847 | 870.0544471 | 1645.817733 | 1445.279135 | 70.64264264 |
| 1221 | 4.623993994 | 6.543957295 | 162.8805333 | 351.0642505 | 69.0990991 |
| 244 | 58.45195195 | 21.55924157 | 230.3276 | 403.0327754 | 68.13213213 |
| 657 | 213.6305105 | 44.46268652 | 438.9708 | 365.3515242 | 69.44744745 |
| 18597 | 94.84132132 | 24.63570978 | 165.3626667 | 174.1846481 | 74.04804805 |
| 13930 | 97.47840841 | 25.86326313 | 169.7642667 | 155.6754159 | 73.68168168 |
| 3050 | 70.99321321 | 30.97427774 | 178.296 | 152.017052 | 71.96396396 |
| 14840 | 16.23504505 | 9.495416923 | 29.5148 | 45.54277471 | 73.2972973 |
| 15892 | 46.68723724 | 28.17584274 | 113.8484 | 106.7604541 | 70.33033033 |
| 19184 | 16.72972973 | 15.38497159 | 42.66706667 | 53.94375038 | 67.94594595 |
| 13291 | 158.8336937 | 36.43992152 | 190.7336 | 125.3794767 | 68.46246246 |
| 21653 | 108.6768168 | 33.8784464 | 180.1490667 | 85.84586661 | 71.86186186 |
| 21740 | 254.009009 | 65.86437227 | 345.4734667 | 223.7874086 | 72.82882883 |
| 21796 | 253.457958 | 76.45052978 | 344.1602667 | 201.6813064 | 77.71171171 |
| 4048 | 6.934114114 | 28.88749489 | 109.7854667 | 203.1293868 | 69.6996997 |
| 4725 | 67.20492492 | 45.50835024 | 196.1262667 | 241.2131264 | 66.26426426 |
| 12979 | 283.0270571 | 69.70681028 | 474.0812 | 466.1164226 | 70.33033033 |
| 10317 | 168.6707207 | 98.09793834 | 398.7746667 | 372.3880631 | 67.81381381 |
| 4969 | −27.81138138 | 29.49309846 | 39.90693333 | 109.5442595 | 66.78078078 |
| 22666 | 64.99294294 | 29.95874228 | 132.2769333 | 77.22446481 | 72.46246246 |
| 24219 | 270.5740541 | 56.99366137 | 310.9173333 | 195.1191918 | 70.03003003 |
| 9166 | 58.24063063 | 36.37848468 | 115.5628 | 87.83244861 | 67.41141141 |
| 16533 | 297.6689489 | 80.00007371 | 353.3222667 | 204.2514635 | 74.44444444 |
| 13240 | 36.84933934 | 24.2983443 | 217.4728 | 295.2240047 | 71.01501502 |
| 15191 | 73.55387387 | 147.0000176 | 835.7512 | 1240.522261 | 68.64864865 |
| 22615 | 38.06543544 | 38.14715918 | 179.3072 | 213.8526855 | 71.98198198 |
| 20589 | 141.2745946 | 40.41159864 | 220.17 | 222.0598445 | 66.86486486 |
| 21284 | 11.28018018 | 11.32357446 | 42.2628 | 45.75836649 | 68.03003003 |
| 7700 | 38.38453453 | 15.97951121 | 74.8852 | 63.58685582 | 68.11411411 |
| 24209 | −0.938468468 | 32.11077523 | 98.36706667 | 131.0425901 | 70.84684685 |
| 12745 | 171.2609309 | 45.01220927 | 256.3192 | 127.4189463 | 70.31231231 |
| 10071 | 255.8928829 | 73.65188401 | 333.818 | 244.1968914 | 74.0960961 |
| 20740 | 416.8621321 | 104.9626061 | 504.2676 | 311.2743053 | 72.37837838 |
| 15004 | 272.1264565 | 96.15890067 | 711.5694667 | 654.1443082 | 69.98198198 |
| 21663 | 329.2990991 | 103.8992814 | 468.7245333 | 414.0000322 | 68.04804805 |
| 13634 | 865.2964264 | 132.9344871 | 1009.422133 | 569.5991098 | 70.97897898 |
| 22311 | 129.7924324 | 36.03268841 | 167.8010667 | 130.8693873 | 69.57957958 |
| 15644 | 1108.512883 | 193.4400937 | 1168.529067 | 588.9984693 | 71.71171171 |
| 21657 | 810.1552553 | 149.7486347 | 950.3389333 | 452.1725091 | 77.34534535 |
| 15051 | 100.5486787 | 36.5306203 | 423.4646667 | 539.2944453 | 71.83183183 |
| 804 | 48.453003 | 17.3476378 | 136.0454667 | 252.5131317 | 70.4984985 |
| 17477 | 48.03099099 | 18.31845744 | 130.196 | 122.9390777 | 73.53153153 |
| 9583 | 63.32945946 | 23.97049962 | 156.3501333 | 138.8519633 | 70.56456456 |
| 806 | 104.0790991 | 38.57735781 | 262.0394667 | 206.8242271 | 75.38138138 |
| 17736 | 495.3388889 | 193.1228301 | 840.7049333 | 673.1283815 | 74.3963964 |
| 8477 | 633.9702102 | 137.901978 | 773.1670667 | 441.5078833 | 71.27927928 |
| 13633 | 305.4563664 | 90.26020694 | 409.7552 | 276.7145158 | 70.67867868 |
| 11404 | 95.40525526 | 25.45018912 | 124.0573333 | 81.37672486 | 75.06306306 |
| 23038 | 12.70459459 | 31.90466814 | 123.0434667 | 144.4113666 | 75.2972973 |
| 22432 | 117.0051652 | 32.59966127 | 143.2058667 | 83.64197807 | 68.89489489 |
| 21654 | 195.4411111 | 36.28835456 | 269.9418667 | 198.8356806 | 71.8978979 |
| 15042 | 39.07891892 | 31.16281275 | 133.2384 | 112.6081482 | 73.96396396 |
| 9423 | 161.4653153 | 43.39107869 | 234.2049333 | 186.0967937 | 69.64564565 |
| 23869 | 37.38426426 | 23.1410014 | 146.1506667 | 169.2856008 | 69.44744745 |
| 15189 | 263.7455856 | 123.0099327 | 829.2574667 | 845.5430688 | 72.18018018 |
| 22677 | 130.0316817 | 78.66102337 | 291.6418667 | 164.9890655 | 74.37837838 |
| 15190 | 192.534955 | 113.543054 | 768.8886667 | 843.1346494 | 68.48048048 |
| 14763 | 15.69915916 | 55.29195278 | 160.1976 | 217.6567383 | 68.03003003 |
| 24200 | 589.2201201 | 119.7479072 | 757.8837333 | 476.5973886 | 72.46246246 |
| 574 | 557.0646847 | 127.5518084 | 682.7218667 | 404.188059 | 76.0960961 |
| 1892 | 982.935015 | 274.4452657 | 1255.822533 | 798.7510893 | 75.72972973 |
| 15003 | 57.02492492 | 43.85939442 | 361.8852 | 467.3514167 | 70.43243243 |
| 17401 | 519.3374474 | 129.24869 | 1091.634533 | 771.6544413 | 72.93093093 |
| 3049 | 237.4652252 | 63.18596703 | 414.9229333 | 350.7621453 | 76.48048048 |
| 5292 | 80.4015015 | 36.86776863 | 190.9689333 | 128.0774443 | 73.23123123 |
| 22321 | 153.3996697 | 50.22365877 | 299.7406667 | 179.4179144 | 75.74774775 |
| 6606 | 1714.972342 | 475.267636 | 2441.403733 | 1648.142289 | 75.8978979 |
| 15002 | 155.3522823 | 52.61286866 | 957.8806667 | 1185.872821 | 77.91591592 |

[0189] TABLE 5A
IFOSFAMIDE Attorney Docket No. 44921-5090US
Timepoint(s): 48, 144 hrs Document No. 1828250.1

| Identifier | NonToxMean | NonToxSD | ToxMean | ToxSD | LDA score |
|---|---|---|---|---|---|
| 16448 | 295.3424587 | 122.9466968 | 75.04222222 | 17.90922442 | 96.9924812 |
| 26150 | 3548.292872 | 2396.6288611 | 261.2477778 | 231.8709164 | 96.74185464 |
| 24012 | 893.9981198 | 297.5327424 | 1533.29 | 247.1554579 | 96.49122807 |
| 19358 | 2632.632831 | 1141.272779 | 398.9844444 | 344.5671647 | 96.11528822 |
| 1687 | 5198.764855 | 2223.536206 | 734.3333333 | 690.6095483 | 95.98997494 |
| 18907 | 460.9429339 | 259.0969563 | 59.24111111 | 41.11022058 | 95.73934837 |
| 23096 | 86.6802686 | 114.0827577 | 325.1088889 | 55.08510812 | 95.36340852 |
| 1689 | 11121.36928 | 5507.347687 | 1809.905556 | 1809.714704 | 94.98746867 |
| 4031 | 62.98836777 | 33.23422192 | 131.4044444 | 16.31989439 | 94.61152882 |
| 12745 | 188.7965909 | 81.83675846 | 279.2366667 | 29.31450665 | 94.61152882 |
| 7120 | 52.7047314 | 30.78982343 | 4.4 | 8.386788718 | 94.48621554 |
| 9073 | 23.56423554 | 15.1644237 | 60.74222222 | 12.81258442 | 94.36090226 |
| 18881 | 24.01061983 | 21.70350112 | 36.94333333 | 4.767224035 | 94.36090226 |
| 17832 | 5911.541281 | 2981.707879 | 745.6577778 | 722.4025935 | 94.11027569 |
| 17883 | 4401.742872 | 2443.409704 | 2660.705556 | 301.8011314 | 94.11027569 |
| 25517 | 175.8206612 | 106.8012091 | 69.60333333 | 9.200444283 | 93.98496241 |
| 25742 | 8347.828905 | 5377.253327 | 4622.804444 | 568.0292832 | 93.98496241 |
| 20859 | 5611.207438 | 3111.792163 | 3360.028889 | 326.5182489 | 93.85964912 |
| 17687 | 82.56880165 | 27.62361939 | 135.0622222 | 16.95063625 | 93.85964912 |
| 14981 | 5912.081136 | 3450.077362 | 3177.887778 | 363.279144 | 93.60902256 |
| 13382 | 130.2001033 | 65.68493084 | 271.6855556 | 61.41857478 | 93.60902256 |
| 1845 | 60.05626033 | 81.65511417 | 66.3544444444 | 23.27943788 | 93.35839599 |
| 8515 | 473.0626033 | 167.3302597 | 211.4588889 | 47.70883551 | 93.23308271 |
| 19518 | 37.11066116 | 37.86481857 | 63.35444444 | 14.86912751 | 93.23308271 |
| 19013 | 19.1711157 | 11.63088946 | 37.75666667 | 5.040974608 | 93.10776942 |
| 6727 | 142.0419628 | 37.81757964 | 224.84 | 31.88848969 | 93.10776942 |
| 8612 | 48.80396694 | 32.68228712 | 1.941111111 | 8.541677886 | 93.10776942 |
| 13336 | 342.3178926 | 143.4507323 | 164.2811111 | 43.96638757 | 92.85714286 |
| 1831 | 201.9417769 | 86.41174095 | 73.95777778 | 27.44454581 | 92.85714286 |
| 21152 | 6146.16719 | 3971.973661 | 3550.796667 | 411.3731839 | 92.85714286 |
| 17917 | 156.96514462809 | 154.714297 | 108.8144444 | 67.88608493 | 92.85714286 |
| 16001 | 7525.862996 | 4857.843227 | 3916.177778 | 472.7264354 | 92.0651629 |
| 460 | 3364.606777 | 1604.578237 | 2261.226667 | 182.9600171 | 92.60651629 |
| 16687 | 198.8393802 | 57.67831435 | 275.5644444 | 18.73961053 | 92.48120301 |
| 23157 | 285.4082645 | 617.3022225 | 224.7822222 | 10.76623167 | 92.35588972 |
| 25669 | 6222.719731 | 3227.407969 | 3764.182222 | 347.3161204 | 92.23057644 |
| 1169 | 50.48876033 | 27.83295948 | 74.21777778 | 8.167539069 | 92.10526316 |
| 3016 | 3592.913471 | 1785.617911 | 2301.943333 | 216.9545399 | 92.10526316 |
| 16274 | 55.744462809917 | 47.41495515 | 141.867777777 | 25.78003965 | 91.85463659 |
| 24632 | 52.85609504 | 18.69125368 | 82.03666667 | 14.81684008 | 91.85463659 |
| 11896 | 55.327334710743 | 42.34783266 | 18.16222222 | 28.27681284 | 91.85463659 |
| 13082 | 10.859938016528 | 26.2467805 | 23.61222222 | 9.427467552 | 91.72932331 |
| 2522 | 184.46438016528 | 111.8533887 | 46.68888888888 | 51.38384776 | 91.72932331 |
| 3887 | 46.36555785 | 57.74475168 | 73.69222222 | 17.93160393 | 91.72932331 |
| 12108 | 73.58801653 | 52.40913753 | 163.39 | 29.09819754 | 91.47869674 |
| 17541 | 76.55303719 | 44.33328287 | 201.26 | 71.45394531 | 91.31161236 |
| 20484 | 5409.051632 | 3145.685654 | 3026.711111 | 370.2778782 | 91.22807018 |
| 2134 | 65.17946281 | 18.86782948 | 95.17666667 | 11.55191326 | 91.22807018 |
| 15084 | 176.612562 | 89.38204501 | 122.1722222 | 13.03599227 | 91.22807018 |
| 2361 | 0.3254958677685 | 19.51740492 | 26.99444444444 | 7.107026648 | 91.10275689 |
| 16549 | 79.11066116 | 40.95106431 | 98.56888889 | 8.069004654 | 90.97744361 |
| 25469 | 3999.101715 | 2264.177054 | 702.9644444 | 600.79311881 | 90.97744361 |
| 20735 | 112.5160124 | 52.71330364 | 175.523333 | 22.133977271 | 90.85213033 |
| 25468 | 5394.421612 | 3205.5442951 | 824.2277778 | 807.14183881 | 90.85213033 |
| 25439 | 4434.09407 | 2841.5371851 | 2727.964444 | 324.22106681 | 90.85213033 |
| 449 | 3119.018574 | 1522.513541 | 2215.582222 | 195.3333825 | 90.85213033 |
| 12674 | 1727.625393 | 573.63472451 | 1266.653333 | 82.76753817 | 90.85213033 |
| 11563 | 174.858657 | 303.62734 | 214.8022222 | 29.01315339 | 90.72681704 |
| 18774 | 66.48446281 | 31.75449128 | 114.2411111 | 16.06167912 | 90.60150376 |
| 6044 | 231.0816736 | 76.35066102 | 348.8511111 | 57.568058951 | 90.60150376 |
| 1748 | 14.56117769 | 12.82988335 | 49.91333333 | 22.47527031 | 90.55973266 |
| 14983 | 6793.828554 | 4617.087648 | 3724.592222 | 430.8225521 | 90.47619048 |
| 22266 | 284.4200826 | 89.54957173 | 384.9488889 | 72.4625021 | 90.47619048 |
| 3582 | 107.9265289 | 49.73139083 | 139.1611111 | 15.562306581 | 89.97493734 |
| 9501 | 122.450186 | 39.23734565 | 174.8344444 | 17.04399242 | 89.84962406 |
| 8305 | 188.2241322 | 80.74238021 | 299.8333333 | 35.697739421 | 89.84962406 |
| 1321 | 257.13541322314 | 246.8321581 | 336.54 | 27.19207605 | 89.72431078 |
| 6073 | 77.30741736 | 45.53543396 | 2.547777778 | 15.49715762 | 89.47368421 |
| 17214 | 105.1832231 | 37.14938326 | 153.9688889 | 17.60818378 | 89.47368421 |
| 16130 | 5153.919545 | 3243.176778 | 2936.187778 | 393.2186706 | 89.34837093 |
| 17781 | 483.679938 | 99.18061461 | 610.55 | 47.74043151 | 89.22305764 |
| 1685 | 20026.96275 | 13736.02987 | 3216.13 | 2935.386281 | 89.22305764 |
| 11724 | 106.343719 | 62.42593547 | 41.25111111 | 21.447198211 | 89.22305764 |
| 25051 | 4810.628574 | 2521.049129 | 2890.385556 | 362.7703017 | 89.09774436 |
| 14982 | 4946.49657 | 2696.923427 | 2752.296667 | 286.3110091 | 89.09774436 |
| 21974 | 240.1690289 | 61.55796238 | 316.4166667 | 27.59858828 | 89.09774436 |
| 4011 | 19.46816116 | 27.20707326 | 43.91444444 | 8.420742413 | 89.05597327 |
| 17728 | 3421.904587 | 1622.29565 | 2250.813333 | 252.529158 | 88.97243108 |
| 1684 | 6011.583285 | 3680.358832 | 1062.024444 | 953.8925876 | 88.97243108 |
| 16132 | 5183.351736 | 3083.300296 | 3153.822222 | 430.5672499 | 88.97243108 |
| 956 | 234.1724587 | 94.16687929 | 134.0722222 | 31.39964521 | 88.84711779 |
| 16818 | 161.801095 | 135.1141994 | 0.75888888888 | 18.92479752 | 88.84711779 |
| 21985 | 53.52345041 | 19.80522822 | 93.46555556 | 21.81963514 | 88.8053467 |
| 22915 | 127.3294008 | 42.33833705 | 209.1655556 | 47.93496091 | 88.8053467 |
| 18400 | 34.77673554 | 14.19749027 | 54.33 | 8.082788813 | 88.59649123 |
| 15666 | 4342.886095 | 2307.299639 | 2738.857778 | 401.0623884 | 88.59649123 |
| 2341 | 211.188719 | 84.11933769 | 328.2733333 | 52.26430426 | 88.59649123 |
| 25319 | 7042.756198 | 4653.236324 | 3585.176667 | 527.9172732 | 88.59649123 |
| 1830 | 90.31886364 | 49.04982802 | 26.87222222 | 15.87381317 | 88.47117794 |
| 19774 | 88.07989669 | 142.4449065 | 182.3022222 | 57.69461322 | 88.34586466 |
| 18899 | 55.8539876 | 45.8862251 | 69.30555556 | 7.4076432 | 88.34586466 |
| 17892 | 480.7777273 | 340.3353069 | 90.3 | 47.72109282 | 88.34586466 |
| 17829 | 3872.9525 | 2217.680538 | 1132.295556 | 803.6216543 | 88.34586466 |
| 15892 | 59.0617562 | 57.20439404 | 114.7355556 | 29.46817483 | 88.17878028 |
| 10334 | 16.015123966942 | 42.1503708 | 39.90777778 | 24.16863814 | 88.0952381 |
| 19421 | 5009.232851 | 2685.195976 | 2845.693333 | 357.5013906 | 87.96992481 |
| 1688 | 11130.52589 | 7196.98987 | 2484.48 | 2360.420294 | 87.96992481 |
| 18867 | 176.6817149 | 66.61303833 | 284.2722222 | 52.36278229 | 87.92815372 |
| 6176 | 154.8005992 | 169.3703287 | 44.49444444 | 18.01095855 | 87.84461153 |

[0190] TABLE 5B
CYCLOPHOSPHAMIDE Attorney Docket No. 44921-5090US
Timepoint(s): 48, 192 hrs Document No. 1828250.1

| Identifier | NonToxMean | NonToxSD | ToxMean | ToxSD | LDA score |
|---|---|---|---|---|---|
| 26150 | 3550.217066 | 2394.035515 | 157.7688889 | 162.0784058 | 98.37092732 |
| 25386 | 24.9310124 | 36.32254298 | −68.57555556 | 15.60065312 | 97.86967419 |
| 16448 | 295.9027893 | 121.8653206 | 44.90888889 | 18.08804954 | 97.7443609 |
| 19358 | 2636.427252 | 1134.146396 | 194.9288889 | 156.5233457 | 97.11779449 |
| 24228 | 168.861095 | 40.48597179 | 333.42 | 69.01608979 | 96.86716792 |
| 21661 | 1086.248058 | 455.9224318 | 2415.018889 | 423.7342941 | 96.86716792 |
| 1687 | 5202.480537 | 2216.464369 | 534.5122222 | 565.4217475 | 96.49122807 |
| 18907 | 461.2086777 | 258.6905152 | 44.95 | 35.28762283 | 96.11528822 |
| 1686 | 148.1554959 | 218.0270589 | −201.9277778 | 67.46000644 | 96.11528822 |
| 1998 | 40.01597107 | 38.7933197 | 71.79555556 | 9.409961625 | 95.98997494 |
| 1689 | 11129.27421 | 5494.666153 | 1384.795556 | 1607.871884 | 95.61403509 |
| 20073 | 43.11921488 | 19.54197757 | −0.895555556 | 7.625319848 | 95.23809524 |
| 13336 | 342.4632025 | 143.3142244 | 156.4666667 | 33.10822368 | 94.98746867 |
| 7120 | 52.70555785 | 30.79313655 | 4.355555556 | 7.29294884 | 94.98746867 |
| 1831 | 201.9578306 | 86.42452713 | 73.09444444 | 19.2436081 | 94.61152882 |
| 8612 | 48.78669421 | 32.71563104 | 2.87 | 6.185450671 | 94.61152882 |
| 11724 | 106.6169008 | 62.1452118 | 26.56 | 13.12789968 | 94.36090226 |
| 1845 | 60.04539256 | 81.69007625 | −65.77 | 19.051931 | 94.36090226 |
| 17832 | 5916.115806 | 2973.775003 | 499.65 | 667.4359424 | 94.23558897 |
| 25468 | 5399.580888 | 3198.650731 | 546.7733333 | 612.8920215 | 94.11027569 |
| 13082 | −10.82754132 | 26.30571767 | 21.87 | 5.790556968 | 93.98496241 |
| 1830 | 90.50177686 | 48.82027778 | 17.03555556 | 9.656973013 | 93.98496241 |
| 3251 | −61.64512397 | 81.86963205 | 81.07444444 | 30.20336451 | 93.73433584 |
| 17917 | −156.6332438 | 155.4144821 | 90.96555556 | 42.50735351 | 93.73433584 |
| 4238 | 318.5010744 | 99.31434354 | 473.2188889 | 45.50499738 | 93.35839599 |
| 16924 | 284.114814 | 236.6961766 | 57.18888889 | 48.89563898 | 93.35839599 |
| 25742 | 8356.250227 | 5370.596207 | 4169.924444 | 782.1241441 | 93.35839599 |
| 19255 | 231.8945248 | 108.3436072 | 79.43888889 | 49.01015238 | 93.35839599 |
| 25517 | 176.3818595 | 106.1264971 | 39.42333333 | 22.40504017 | 93.23308271 |
| 25469 | 4003.064938 | 2258.520949 | 489.8311111 | 522.1870591 | 93.10776942 |
| 21841 | 360.488595 | 139.5071375 | 870.68 | 189.0930325 | 92.94068505 |
| 22697 | 420.5272727 | 166.7676437 | 144.0044444 | 72.63931375 | 92.73182957 |
| 18695 | 40.07559917 | 49.03434584 | 114.08 | 27.53621888 | 92.60651629 |
| 18867 | 173.8182025 | 55.92279476 | 438.2655556 | 131.8203047 | 92.5647452 |
| 6330 | 160.3402479 | 54.52644832 | 240.7866667 | 22.77017128 | 92.48120301 |
| 1174 | −48.14640496 | 47.57161759 | 27.14555556 | 18.43397414 | 92.43943191 |
| 20763 | 258.8693595 | 130.0566692 | 151.8366667 | 22.57655144 | 92.35588972 |
| 20110 | −2.24018595 | 28.2945376 | 42.64444444 | 16.35918863 | 92.31411863 |
| 3518 | 404.4912397 | 138.5004293 | 215.8088889 | 56.08156971 | 92.10526316 |
| 23033 | 502.3732438 | 155.7958596 | 359.8811111 | 43.27514975 | 91.97994987 |
| 2980 | 171.7519215 | 89.4989369 | 518.63 | 180.6041871 | 91.93817878 |
| 17203 | 2171.309979 | 878.7260956 | 1319.43 | 172.0204484 | 91.85463659 |
| 20859 | 5610.85407 | 3111.772817 | 3379.032222 | 457.9566721 | 91.72932331 |
| 15966 | 249.7821694 | 74.82839403 | 152.0977778 | 32.29464343 | 91.60401003 |
| 8515 | 473.117624 | 167.1169592 | 208.5 | 69.50892694 | 91.60401003 |
| 17883 | 4402.743079 | 2442.456899 | 2606.916667 | 397.6454441 | 91.35338346 |
| 21211 | 1538.095062 | 538.7278117 | 901.0088889 | 200.9820645 | 91.22807018 |
| 13310 | 271.6145661 | 101.156491 | 558.1344444 | 173.5313029 | 91.0609858 |
| 17728 | 3422.378161 | 1622.03739 | 2225.345556 | 215.6580097 | 90.97744361 |
| 21657 | 832.9477893 | 275.7890614 | 1094.251111 | 90.77742181 | 90.85213033 |
| 15174 | 161.2747521 | 57.93907132 | 279.3077778 | 31.29556829 | 90.81035923 |
| 12988 | 20.65045455 | 15.46554859 | 38.92444444 | 4.434817108 | 90.72681704 |
| 11375 | 94.3567562 | 40.54539428 | 48.32444444 | 13.41039999 | 90.72681704 |
| 15524 | 1465.04093 | 489.2772934 | 1043.641111 | 119.2313393 | 90.60150376 |
| 24651 | 65.80146694 | 22.37305955 | 98.52555556 | 7.582849252 | 90.60150376 |
| 3895 | 20.64446281 | 14.16436528 | 71.39333333 | 29.04984725 | 90.55973266 |
| 5887 | 130.3261777 | 57.18441991 | 283.29 | 98.99798344 | 90.55973266 |
| 449 | 3127.170289 | 1516.361114 | 1777.201111 | 235.8423585 | 90.47619048 |
| 21575 | 144.471095 | 44.31940873 | 212.9177778 | 21.65509454 | 90.35087719 |
| 21798 | 1159.905062 | 287.1257193 | 702.1577778 | 174.5795168 | 90.3091061 |
| 25669 | 6228.35157 | 3222.530309 | 3461.314444 | 489.4610866 | 90.22556391 |
| 6263 | 206.163843 | 69.44186843 | 116.5922222 | 29.10138518 | 90.22556391 |
| 21660 | 1806.16876 | 731.2076053 | 3494.71 | 712.7416667 | 90.18379282 |
| 445 | 44.98719008 | 18.89067489 | 67.78777778 | 8.422898518 | 90.10025063 |
| 13166 | 3.887975207 | 35.11781292 | 42.94333333 | 16.84001633 | 90.10025063 |
| 25676 | 210.0928926 | 171.2011894 | 50.54333333 | 45.36792094 | 89.97493734 |
| 1688 | 11144.47357 | 7181.274687 | 1734.404444 | 1994.331749 | 89.97493734 |
| 17305 | 3940.808802 | 1953.453496 | 2324.277778 | 192.1924222 | 89.97493734 |
| 14289 | 34.21475207 | 17.22421328 | 60.96444444 | 13.73651076 | 89.97493734 |
| 1684 | 6017.427397 | 3672.839597 | 747.74111111 | 796.7840408 | 89.84962406 |
| 6059 | 132.4696901 | 43.4127263 | 60.36111111 | 13.91325128 | 89.80785297 |
| 23096 | 86.53258264 | 113.7166287 | 333.0511111 | 61.13002647 | 89.80785297 |
| 16001 | 7528.734483 | 4855.212997 | 3761 .755556 | 695.9839265 | 89.72431078 |
| 22 | 116.6855992 | 93.01095806 | 193.5 | 61.61612228 | 89.47368421 |
| 22749 | 38.73283058 | 42.66388367 | −65.43333333 | 63.23661657 | 89.43191312 |
| 5357 | 26.56760331 | 27.40335928 | 55.77555556 | 8.202799996 | 89.43191312 |
| 8597 | 156.9250207 | 47.15359875 | 264.1766667 | 46.35992558 | 89.43191312 |
| 7308 | 167.7827273 | 64.37333882 | 330.7888889 | 73.19458458 | 89.43191312 |
| 6002 | 126.4257851 | 130.9476267 | 174.8411111 | 33.83913579 | 89.34837093 |
| 18447 | 672.8122521 | 185.9974265 | 1110.67 | 260.403038 | 89.30659983 |
| 9073 | 23.56169421 | 15.18098129 | 60.87888889 | 11.06225389 | 89.30659983 |
| 5613 | 164.2440289 | 58.38802972 | 92.37111111 | 18.86019581 | 89.22305764 |
| 20647 | 17.54665289 | 13.04689843 | 49.17444444 | 14.26841977 | 88.93065998 |
| 22423 | 93.0628719 | 51.79439474 | 203.6655556 | 63.38365781 | 88.93065998 |
| 17289 | 2775.794938 | 1111.145258 | 1625.054444 | 320.3537481 | 88.84711779 |
| 10991 | 460.4735331 | 153.3327258 | 812.2366667 | 192.550642 | 88.68003342 |
| 20433 | 66.49049587 | 38.21838922 | 122.35 | 37.76470939 | 88.68003342 |
| 5307 | 42.15944215 | 100.4921326 | 51.52222222 | 5.932277762 | 88.59649123 |
| 21152 | 6144.862479 | 3972.39901 | 3620.961111 | 607.7025155 | 88.47117794 |
| 344 | 1165.158781 | 479.1208035 | 2218.087778 | 646.4923876 | 88.42940685 |
| 7760 | 308.1499587 | 98.82016401 | 251.4311111 | 19.11712874 | 88.34586466 |
| 19257 | −19.99838843 | 37.95188675 | 33.55777778 | 22.04014563 | 88.30409357 |
| 16925 | 861.1141116 | 256.1801506 | 441.9555556 | 152.8097041 | 88.30409357 |

[0191] TABLE 5C
MINOXIDIL Attorney Docket No. 44921-5090US
Timepoint(s): 24, 360 hrs Document No. 1828250.1

| Identifier | NonToxMean | NonToxSD | ToxMean | ToxSD | LDA score |
|---|---|---|---|---|---|
| 22773 | 437.8067556 | 113.9173578 | 770.9766667 | 186.8354675 | 96.76616915 |
| 14668 | 52.87129363 | 22.73990709 | 112.885 | 12.59923768 | 96.64179104 |
| 16426 | 1350.468049 | 590.2190351 | 2794.431667 | 568.1514554 | 95.89552239 |
| 15185 | 833.5899795 | 276.3338857 | 1365.58 | 220.1438492 | 94.7761194 |
| 21239 | 120.463306 | 69.30761948 | 22.36166667 | 26.2895199 | 94.52736318 |
| 20740 | 421.6917864 | 176.0108843 | 658.555 | 67.87724295 | 93.53233831 |
| 1514 | 218.1905339 | 120.2409921 | 350.3033333 | 76.61980049 | 93.53233831 |
| 22300 | 807.8076386 | 277.8860352 | 1278.253333 | 336.4332626 | 93.28358209 |
| 5969 | 440.1926078 | 161.104246 | 289.7616667 | 31.34946342 | 92.66169154 |
| 8580 | 51.76552361 | 27.86640474 | 56.36666667 | 3.172429143 | 92.1641791 |
| 24128 | 236.1605133 | 238.7952892 | 298.9316667 | 9.054462804 | 91.91542289 |
| 25094 | 129.5336345 | 54.38900928 | 180.97 | 12.31225893 | 91.41791045 |
| 15134 | 1062.092444 | 298.8329959 | 1215 | 76.86737279 | 91.29353234 |
| 22762 | 41.85238193 | 21.96300286 | 16.695 | 4.829284626 | 91.16915423 |
| 22915 | 128.4721971 | 43.93624616 | 157.3266667 | 6.991568255 | 90.7960199 |
| 15098 | 238.0394867 | 751.9793033 | 40.31166667 | 6.580618259 | 90.67164179 |
| 20848 | 1347.288172 | 440.8872106 | 1885.28 | 179.2055575 | 90.29850746 |
| 15292 | 68.32913758 | 25.701704461 | 38.195 | 6.108986004 | 90.29850746 |
| 6638 | 168.8499384 | 59.642012651 | 100.725 | 19.79344715 | 90.29850746 |
| 19480 | 1688.225893 | 545.93845291 | 2041.73 | 65.26765661 | 90.17412935 |
| 18725 | 42.04147844 | 24.15465745 | 25.46666667 | 2.55266658 | 89.30348259 |
| 24106 | 41.35211499 | 56.74408849 | 16.57166667 | 2.102678451 | 89.17910448 |
| 16322 | 112.6205544 | 33.29871385 | 157.76 | 12.297368821 | 88.93034826 |
| 18047 | 182.3833881 | 65.23717287 | 156.8233333 | 3.930957475 | 88.93034826 |
| 3088 | 42.74778234 | 32.65876885 | 36.32166667 | 2.583597621 | 88.93034826 |
| 24536 | 856.056037 | 267.7588433 | 1092.88 | 78.40703846 | 88.80597015 |
| 13596 | 1759.77768 | 617.566612 | 2637.788333 | 450.2181273 | 88.68159204 |
| 10829 | 53.38402464 | 32.19043564 | 91.23166667 | 25.31275285 | 88.1840796 |
| 4749 | 217.9386653 | 220.4647071 | 118.0333333 | 10.68132326 | 88.1840796 |
| 23596 | 301.3894251 | 101.2974417 | 216.15 | 32.28049442 | 88.05970149 |
| 23109 | 722.1644969 | 230.6924095 | 993.4616667 | 57.08507665 | 87.81094527 |
| 21818 | 39.564846 | 21.39138776 | 67.12666667 | 17.1317304 | 87.81094527 |
| 16312 | 70.97347023 | 42.54349354 | 36.005 | 8.413006003 | 87.68656716 |
| 18500 | 257.9291786 | 65.24252149 | 417.76 | 156.6989757 | 87.68656716 |
| 16124 | 224.9221561 | 101.6943359 | 131.69 | 19.99114204 | 87.68656716 |
| 7063 | 2777.985873 | 1129.206637 | 3441.838333 | 176.2347945 | 87.56218905 |
| 15569 | 401.426694 | 190.4056947 | 515.0683333 | 33.01171151 | 87.43781095 |
| 6282 | 185.8444559 | 66.66380694 | 222.7066667 | 17.68440631 | 87.43781095 |
| 3014 | 207.0456263 | 79.85192971 | 167.0216667 | 17.48674746 | 87.31343284 |
| 2005 | 37.20353183 | 19.95236328 | 15.27 | 9.920762068 | 87.31343284 |
| 1609 | 794.7036756 | 398.5283242 | 975.035 | 83.35706059 | 87.18905473 |
| 17224 | 1521.834374 | 458.5879475 | 1286.183333 | 91.95915412 | 87.06467662 |
| 7299 | 268.1671047 | 158.3330032 | 287.415 | 29.82061351 | 86.8159204 |
| 21583 | 357.890924 | 134.8922926 | 649.1816667 | 148.858798 | 86.8159204 |
| 12674 | 1706.457515 | 558.4805731 | 2754.293333 | 745.0542962 | 86.69154229 |
| 21581 | 571.0711704 | 161.1591653 | 712.2466667 | 73.11932649 | 86.69154229 |
| 14983 | 6631.179507 | 4479.972588 | 15391.655 | 5866.928943 | 86.69154229 |
| 19728 | 38.61924025 | 25.9328192 | 50.46333333 | 6.484111864 | 86.56716418 |
| 15048 | 1611.983429 | 522.4000395 | 2280.323333 | 234.5551045 | 86.44278607 |
| 16130 | 5031.751396 | 3133.431058 | 11743.30333 | 4153.659745 | 86.44278607 |
| 15886 | 399.6893224 | 123.6458295 | 489.11 | 29.43699373 | 86.31840796 |
| 20038 | 184.9781314 | 66.60638817 | 135.2616667 | 21.11623017 | 86.31840796 |
| 22498 | 73.93030801 | 77.50115096 | 98.645 | 15.11319258 | 86.31840796 |
| 17541 | 78.86632444 | 48.15834116 | 75.85166667 | 8.561437769 | 86.31840796 |
| 25050 | 4339.285318 | 2419.508026 | 9783.871667 | 2938.951862 | 86.19402985 |
| 16191 | 20.2310883 | 14.26758646 | 4.41 | 4.338188562 | 86.19402985 |
| 25319 | 6869.121766 | 4515.612917 | 15949.715 | 5786.841993 | 86.19402985 |
| 17908 | 47.90513347 | 39.02335634 | 14.825 | 7.884016109 | 86.19402985 |
| 18826 | 935.1048255 | 304.215653 | 683.405 | 108.4606395 | 86.06965174 |
| 2757 | 903.1013347 | 270.6404596 | 1366.795 | 213.6819286 | 86.06965174 |
| 4696 | 238.4688296 | 90.50570088 | 214.46 | 18.47564018 | 85.94527363 |
| 17632 | 89.20907598 | 33.46363831 | 125.705 | 17.0903935 | 85.94527363 |
| 12086 | 51.39412731 | 23.122172 | 54.58333333 | 4.50703746 | 85.94527363 |
| 3252 | 258.1934702 | 91.63035437 | 348.4483333 | 45.97108675 | 85.69651741 |
| 14384 | 513.7437577 | 159.8243939 | 625.8883333 | 35.06961501 | 85.69651741 |
| 19421 | 4905.447166 | 2612.813526 | 10187.86167 | 2889.206221 | 85.69651741 |
| 21152 | 6009.901417 | 3871.75871 | 13313.35 | 3985.438002 | 85.69651741 |
| 15741 | 278.6177002 | 91.60974085 | 198.5683333 | 40.29901359 | 85.69651741 |
| 14677 | 40.8373306 | 19.03190667 | 33.94833333 | 2.932817189 | 85.44776119 |
| 25439 | 4340.748193 | 2767.496686 | 9451.473333 | 3142.022674 | 85.44776119 |
| 25051 | 4710.8946 | 2442.685332 | 10025.33833 | 2691.144779 | 85.44776119 |
| 18272 | 93.70318275 | 63.79624646 | 56.58 | 5.891994569 | 85.32338308 |
| 17829 | 3780.245647 | 2195.997395 | 7286.673333 | 2466.488402 | 85.19900498 |
| 12135 | 41.10051335 | 18.68621179 | 30.72833333 | 5.003268598 | 85.19900498 |
| 7192 | 37.9426694 | 19.2370438 | 19.48166667 | 7.447752457 | 85.07462687 |
| 18021 | 141.865154 | 49.71003269 | 104.6766667 | 14.10675252 | 85.07462687 |
| 13033 | 81.59747433 | 28.86269731 | 101.9116667 | 14.09055062 | 84.95024876 |
| 8641 | 286.4467351 | 108.7810528 | 206.685 | 28.50822109 | 84.95024876 |
| 211 | 324.7765092 | 106.4010454 | 351.405 | 22.32212064 | 84.95024876 |
| 16132 | 5081.47 | 3013.732273 | 10408.45833 | 3076.016463 | 84.95024876 |
| 25742 | 8155.523142 | 5230.123357 | 18369.11 | 5977.202401 | 84.82587065 |
| 3682 | 162.7474127 | 76.60995297 | 186.9 | 12.30250056 | 84.82587065 |
| 20484 | 5303.545113 | 3085.010121 | 10399.15333 | 3206.107941 | 84.82587065 |
| 16886 | 1122.859877 | 543.2204479 | 1799.311667 | 394.2385372 | 84.82587065 |
| 18644 | 3361.113121 | 1749.187247 | 6525.706667 | 2192.432727 | 84.82587065 |
| 25545 | 386.3327515 | 254.1459957 | 516.5216667 | 112.7519602 | 84.82587065 |
| 9757 | 562.985462 | 133.7021905 | 565.03 | 25.3630495 | 84.82587065 |
| 18831 | 2631.251478 | 977.9807206 | 3436.33 | 405.701451 | 84.82587065 |
| 14981 | 5794.853676 | 3386.181972 | 11325.75333 | 3532.04975 | 84.70149254 |
| 16001 | 7355.064107 | 4741.387194 | 15974.51167 | 5460.203589 | 84.57711443 |
| 2802 | 398.1116632 | 105.2482808 | 550.6433333 | 97.96724303 | 84.57711443 |
| 16224 | 1413.696817 | 705.4146787 | 2619.071667 | 453.1790805 | 84.57711443 |
| 12066 | 379.866961 | 109.3099973 | 512.685 | 57.09029681 | 84.45273632 |
| 600 | 302.0152567 | 62.04587159 | 263.125 | 18.47615084 | 84.45273632 |
| 6133 | 625.038501 | 196.2520832 | 823.2183333 | 78.76218215 | 84.45273632 |
| 20004 | 39.32911704 | 20.17920335 | 71.94833333 | 20.30710951 | 84.45273632 |

[0192] TABLE 5D
HYDRALAZINE Attorney Docket No. 44921-5090US
Timepoint(s): 6 hrs Document No. 1828250.1

| Identifier | NonToxMean | NonToxSD | ToxMean | ToxSD | LDA score |
|---|---|---|---|---|---|
| 21351 | 25.28877049 | 50.01340774 | 80.7 | 6.247287411 | 99.50372208 |
| 11728 | 334.3587705 | 101.5532665 | 753.134 | 68.66121125 | 99.37965261 |
| 13270 | 149.1222746 | 73.25022364 | 476.398 | 65.59619936 | 99.25558313 |
| 15885 | 123.8732172 | 45.22333596 | 280.744 | 25.11900934 | 99.13151365 |
| 2416 | 304.2884631 | 93.70017094 | 501.23 | 5.625997689 | 99.00744417 |
| 6548 | 229.8347541 | 94.58230898 | 694.764 | 100.4268218 | 98.75930521 |
| 23110 | 186.4067623 | 60.6339517 | 344.77 | 15.43075176 | 98.75930521 |
| 25567 | 76.14856557 | 37.53074352 | 230.18 | 33.0816505 | 98.75930521 |
| 11727 | 291 .7623975 | 103.4853208 | 604.39 | 48.07210054 | 98.75930521 |
| 5258 | 369.7012705 | 94.61155347 | 664.15 | 45.82124889 | 98.63523573 |
| 3050 | 90.40352459 | 81.2674084 | 228.84 | 38.57028455 | 98.63523573 |
| 11726 | 252.4103279 | 113.6082746 | 533.508 | 40.55234297 | 98.38709677 |
| 3601 | 79.51719262 | 113.1260376 | 143.32 | 14.31897343 | 98.38709677 |
| 22464 | 108.1432172 | 46.05567267 | 278.934 | 40.19916765 | 98.38709677 |
| 19765 | 307.5082582 | 99.80835218 | 198.27 | 13.5588071 | 98.38709677 |
| 5129 | 78.23938525 | 35.29730289 | 169.976 | 12.30108654 | 98.2630273 |
| 7867 | 65.29440574 | 53.54378614 | 248.112 | 37.43640367 | 98.2630273 |
| 6936 | 75.82836066 | 36.41221995 | 198.006 | 27.93613484 | 98.13895782 |
| 20735 | 112.1542623 | 51.03917009 | 261.236 | 24.8571364 | 98.01488834 |
| 2378 | 53.8614959 | 22.53663678 | 129.844 | 19.37597043 | 98.01488834 |
| 19894 | 191.3700205 | 73.43627719 | 446.052 | 124.8858075 | 98.01488834 |
| 7299 | 263.2301025 | 149.2293008 | 773.116 | 120.8479132 | 98.01488834 |
| 7615 | 24.77413934 | 27.20961181 | 91.918 | 11.35597508 | 97.89081886 |
| 6562 | 79.63844262 | 27.10251 284 | 47.556 | 3.120437469 | 97.76674938 |
| 6053 | 7.246311475 | 11.37850051 | 36.264 | 5.106792535 | 97.76674938 |
| 8745 | 100.6684631 | 32.79596914 | 215.862 | 38.97077007 | 97.76674938 |
| 3003 | 59.87430328 | 63.74773452 | 417.552 | 106.1544362 | 97.76674938 |
| 23419 | 209.1499385 | 112.264608 | 347.558 | 37.75746774 | 97.76674938 |
| 6094 | 94.49360656 | 45.97738444 | 223.658 | 29.8297464 | 97.76674938 |
| 15841 | 52.45456967 | 26.02317729 | 85.158 | 5.254756893 | 97.6426799 |
| 6743 | 1056.460881 | 304.7263469 | 691.138 | 71.24019245 | 97.6426799 |
| 6560 | 261.8389139 | 76.83317084 | 432.406 | 30.29522537 | 97.6426799 |
| 5531 | 91.45577869 | 33.33677889 | 172.85 | 10.81836864 | 97.51861042 |
| 22614 | 39.96616803 | 26.33375601 | 156.954 | 73.5844544 | 97.51861042 |
| 12999 | 358.3752664 | 406.08666 | 639.448 | 135.479653 | 97.51861042 |
| 15212 | 58.32362705 | 48.5372259 | 116.17 | 20.97174409 | 97.51861042 |
| 20734 | 99.62717213 | 46.30310971 | 247.582 | 38.20457198 | 97.51861042 |
| 13083 | 12.19112705 | 11.35329523 | 49.166 | 8.230603259 | 97.51861042 |
| 23139 | 889.4179303 | 280.7060842 | 624.278 | 26.8757199 | 97.51861042 |
| 23035 | 125.0278893 | 44.18525457 | 245.704 | 21.65331915 | 97.39454094 |
| 12303 | 24.63354508 | 39.92502514 | 112.714 | 15.48603338 | 97.39454094 |
| 20901 | 126.0247131 | 49.181078 | 192.442 | 12.25019877 | 97.39454094 |
| 12609 | 229.6128689 | 70.58678004 | 395.284 | 29.79925553 | 97.39454094 |
| 17468 | 63.40719262 | 14.11477671 | 41.45 | 2.517806585 | 97.39454094 |
| 3430 | 110.9984016 | 34.42005532 | 189.106 | 13.11816794 | 97.27047146 |
| 3615 | 273.272418 | 142.0209262 | 575.834 | 43.26622967 | 97.27047146 |
| 2729 | 526.5145902 | 211.8606837 | 276.05 | 17.51608546 | 97.27047146 |
| 3941 | 178.5560656 | 73.37835308 | 380.742 | 47.43371923 | 97.27047146 |
| 4749 | 216.1424795 | 220.4400788 | 273.36 | 7.217873648 | 97.27047146 |
| 13240 | 82.07870902 | 170.9465173 | 177.364 | 78.48562945 | 97.27047146 |
| 22958 | 242.8463934 | 113.1769807 | 375.692 | 31.51711075 | 97.27047146 |
| 3988 | 103.0042828 | 44.78536688 | 201.586 | 16.73593828 | 97.14640199 |
| 23230 | 263.4350205 | 77.37219894 | 162.82 | 9.76721813 | 97.14640199 |
| 18897 | 143.05782791 | 58.80227535 | 66.48 | 4.752252098 | 97.14640199 |
| 13966 | 94.300655741 | 36.7385077 | 194.022 | 33.47051419 | 97.02233251 |
| 8495 | 127.5997131 | 44.48435803 | 192.222 | 8.326732252 | 97.02233251 |
| 23632 | 120.1993648 | 57.71823343 | 219.914 | 21.75806126 | 96.89826303 |
| 22411 | 89.94428279 | 39.81299229 | 183.18 | 16.21797614 | 96.89826303 |
| 22666 | 78.62934426 | 49.73954055 | 125.038 | 7.350821043 | 96.77419355 |
| 18673 | 133.5581967 | 39.76929661 | 237.244 | 27.73314137 | 96.77419355 |
| 5292 | 103.9889959 | 77.71665696 | 376.76 | 113.5779994 | 96.77419355 |
| 3049 | 270.0245287 | 176.9428259 | 498.444 | 86.81850022 | 96.77419355 |
| 12098 | −4.470143443 | 38.06130214 | 90.994 | 33.14980513 | 96.65012407 |
| 4725 | 89.900799181 | 121.3694137 | 239.676 | 67.29365074 | 96.65012407 |
| 25379 | 182.44686481 | 58.70865091 | 314.97 | 26.02254695 | 96.52605459 |
| 23184 | 51.544364751 | 20.45905428 | 99.778 | 11.46841183 | 96.52605459 |
| 4432 | 44.89356557 | 28.7463111 | 116.542 | 21.41826253 | 96.52605459 |
| 11331 | 84.0029918 | 27.00256457 | 140.22 | 14.35317212 | 96.52605459 |
| 2242 | 179.3839549 | 109.2501927 | 449.872 | 63.97026981 | 96.40198511 |
| 22948 | 226.7368238 | 88.46303286 | 406.712 | 35.71772767 | 96.27791563 |
| 21474 | 26.06686475 | 37.62057819 | 58.854 | 16.86412405 | 96.27791563 |
| 13420 | 392.077377 | 136.1010405 | 643.844 | 55.5189907 | 96.27791563 |
| 9658 | 89.48319672 | 60.98883523 | 244.732 | 62.7517846 | 96.15384615 |
| 8786 | 227.0502869 | 57.31974738 | 354.85 | 38.90896812 | 96.15384615 |
| 10019 | 135.9156148 | 51.50047551 | 215.752 | 15.05196067 | 96.15384615 |
| 21447 | 84.93477459 | 72.3054854 | 134.306 | 15.02143402 | 96.15384615 |
| 1031 | 70.47788934 | 23.78814851 | 110.658 | 6.08208188 | 96.15384615 |
| 4089 | 86.77180328 | 50.36619051 | 152.214 | 18.13651786 | 96.15384615 |
| 7220 | 76.98762295 | 52.95135462 | 51 .862 | 0.787953044 | 96.02977667 |
| 14955 | −144.6063525 | 185.8863263 | 181.094 | 80.56877081 | 96.02977667 |
| 15215 | 46.76629098 | 71.69519515 | 96.74 | 4.716312119 | 96.02977667 |
| 101151 | 72.56655738 | 39.87979807 | 176.686 | 32.01721303 | 96.02977667 |
| 51861 | 68.7789959 | 43.12884438 | 140.366 | 31.8155682 | 95.9057072 |
| 6135 | 96.06844262 | 60.215514 | 18.306 | 5.138353822 | 95.9057072 |
| 3392 | 18.26368852 | 19.32174615 | 37.24 | 5.439172731 | 95.9057072 |
| 19005 | 23.93286885 | 27.2110811 | 58.162 | 3.216227604 | 95.78163772 |
| 16834 | 82.12 | 36.37427009 | 148.728 | 10.54378111 | 95.78163772 |
| 12107 | 214.0981148 | 48.85349382 | 306.29 | 27.59810954 | 95.78163772 |
| 20823 | 4789.302008 | 1460.120187 | 3761.908 | 72.57799164 | 95.78163772 |
| 1571 | 172.7995902 | 52.57153601 | 290.112 | 33.25647711 | 95.78163772 |
| 16679 | 85.16483607 | 55.49961919 | 114.73 | 3.186847973 | 95.78163772 |
| 20740 | 420.9239754 | 173.9236038 | 780.866 | 98.83567059 | 95.65756824 |
| 13029 | 203.5453893 | 109.8932269 | 435.558 | 85.38083315 | 95.65756824 |
| 17903 | 134.3879918 | 52.4369357 | 244.54 | 29.13306197 | 95.65756824 |
| 8541 | 52.66313525 | 43.41680816 | 155.044 | 32.98623092 | 95.65756824 |
| 9583 | 81.29731557 | 72.74693735 | 147.982 | 35.59071396 | 95.65756824 |
| 18172 | 56.73938525 | 31.97006523 | 114.12 | 11.09620881 | 95.5756824 |
| 17342 | 96.22192623 | 40.72937854 | 186.694 | 24.4790059 | 95.53349876 |

[0193] TABLE 5E
BI-QT Attorney Docket No. 44921-5090US
Timepoint(s): 168, 336 hrs Document No. 1828250.1

| Identifier | NonToxMean | NonToxSD | ToxMean | ToxSD | LDA score |
|---|---|---|---|---|---|
| 15571 | 1146.880144 | 395.2301612 | 344.0114286 | 78.5393484 | 99.50124688 |
| 4130 | 224.4683539 | 90.2743589 | 61.24857143 | 21.27678346 | 99.25187032 |
| 13985 | 192.7222428 | 107.6912308 | 940.0885714 | 548.037149 | 99.12718204 |
| 6155 | 2926.942387 | 1119.661491 | 839.7942857 | 183.1872543 | 99.12718204 |
| 6153 | 545.0967695 | 216.1557262 | 150.66 | 30.14385012 | 99.00249377 |
| 22385 | 157.9224074 | 76.66175396 | 26.55 | 7.325947038 | 98.87780549 |
| 24072 | 21.71541152 | 30.2751282 | 58.57571429 | 11.67921067 | 98.87780549 |
| 25632 | 1153.660144 | 384.1645161 | 332.5 | 83.94025951 | 98.62842893 |
| 16909 | 282.7741975 | 106.2392905 | 497.3228571 | 47.77587387 | 98.62842893 |
| 17739 | 96.96164609 | 61.17559301 | 15.43 | 9.458525255 | 98.62842893 |
| 22386 | 377.1867078 | 156.9790178 | 80.55714286 | 28.64955364 | 98.37905237 |
| 3780 | 265.3458642 | 204.4183726 | 1800.691429 | 455.8843974 | 98.37905237 |
| 18541 | 1459.720021 | 519.9366207 | 2922.245714 | 346.1402564 | 98.25436409 |
| 25647 | 188.3438683 | 104.7747009 | 650.29 | 186.492508 | 98.25436409 |
| 2852 | 428.362037 | 187.9366738 | 135.16 | 25.3881685 | 98.25436409 |
| 23927 | 105.5380864 | 89.82305587 | 472.3742857 | 134.9741641 | 98.12967581 |
| 20925 | 1087.997305 | 385.8777079 | 2342.994286 | 432.2368176 | 98.12967581 |
| 14516 | 127.7729835 | 70.60924102 | 518.35 | 279.8149362 | 98.00498753 |
| 16426 | 1381.330185 | 604.334374 | 445.4371429 | 127.9430389 | 98.00498753 |
| 17358 | 1801.238971 | 591.0796197 | 3310.938571 | 322.5233568 | 97.75561097 |
| 6156 | 612.5829218 | 252.0319969 | 178.0885714 | 39.95518424 | 97.75561097 |
| 15438 | 225.8336214 | 74.28338074 | 78.97571429 | 17.44229425 | 97.75561097 |
| 2103 | 2781.732942 | 832.9661434 | 4941.147143 | 817.8200858 | 97.63092269 |
| 25663 | 398.4210082 | 286.1815128 | 2127.534286 | 860.1651723 | 97.63092269 |
| 20617 | 225.4005761 | 146.6464791 | 637.2714286 | 207.0700452 | 97.63092269 |
| 24521 | 5871.713724 | 1743.189805 | 11366.89286 | 2042.009624 | 97.50623441 |
| 15569 | 407.4651646 | 186.980155 | 79.59142857 | 23.82907847 | 97.50623441 |
| 26030 | 1019.45144 | 416.7005322 | 2307.601429 | 329.0417094 | 97.50623441 |
| 25716 | 629.3167284 | 321.6678121 | 2028.478571 | 531.6434546 | 97.50623441 |
| 25671 | 96.61096708 | 54.5217446 | 324.9414286 | 104.2805727 | 97.50623441 |
| 25918 | 40.67644033 | 24.17785017 | 151.8957143 | 52.53468056 | 97.38154613 |
| 4468 | 238.3986831 | 90.76454198 | 87.61 | 25.76276836 | 97.25685786 |
| 10820 | 2016.776502 | 528.6935889 | 3615.775714 | 669.0374831 | 97.25685786 |
| 25691 | 910.3856584 | 238.3647268 | 1740.794286 | 305.2156721 | 97.25685786 |
| 14928 | 875.0561111 | 272.4300315 | 1524.474286 | 184.1657844 | 97.25685786 |
| 5596 | 118.6190741 | 52.69410791 | 48.98142857 | 5.334752192 | 97.13216958 |
| 17203 | 2126.510741 | 848.1329048 | 4186.382857 | 491.1376271 | 97.13216958 |
| 19094 | 1802.569053 | 511.7092442 | 3011.387143 | 403.2550496 | 97.13216958 |
| 26133 | 187.2550412 | 152.2951324 | 651.9285714 | 291.6253559 | 97.13216958 |
| 16953 | 1149.682613 | 395.8125977 | 2207.674286 | 341.0510964 | 97.0074813 |
| 17687 | 84.04351852 | 28.20993149 | 47.67285714 | 4.369506892 | 97.0074813 |
| 24264 | 226.0653704 | 60.74150388 | 104.7857143 | 21.85609058 | 96.88279302 |
| 24268 | 160.5231687 | 93.51216047 | 48.98571429 | 15.7582157 | 96.75810474 |
| 18542 | 1410.127613 | 591.2972027 | 3140.035714 | 530.3397695 | 96.75810474 |
| 25702 | 669.0991152 | 161.3180834 | 1261.007143 | 209.6897601 | 96.75810474 |
| 14696 | 1412.849074 | 542.7044511 | 2881.84 | 376.1605253 | 96.63341646 |
| 6205 | 418.8476543 | 103.1580387 | 277.4428571 | 24.53683742 | 96.63341646 |
| 22930 | 325.4591564 | 178.4676831 | 65.04428571 | 24.94755423 | 96.63341646 |
| 18606 | 747.3085185 | 251.2163681 | 1476.484286 | 266.8125197 | 96.50872818 |
| 24310 | 294.4701029 | 113.7572958 | 86.83714286 | 30.73016689 | 96.50872818 |
| 3324 | 22.2987037 | 20.44562524 | 74.09714286 | 16.49790766 | 96.3840399 |
| 10498 | 1222.585761 | 451.0798756 | 2408.967143 | 311.0807358 | 96.3840399 |
| 5049 | 619.2253909 | 166.158467 | 363.0071429 | 70.05085812 | 96.25935162 |
| 8137 | 271.8144444 | 88.72552217 | 168.51 | 14.26964844 | 96.25935162 |
| 10109 | 1183.328992 | 282.8203183 | 2069.12 | 324.8440536 | 96.25935162 |
| 12639 | 1454.544053 | 544.733031 | 2790.017143 | 354.1095492 | 96.25935162 |
| 16938 | 1732.038395 | 603.1174343 | 3439.441429 | 525.2777621 | 96.25935162 |
| 18686 | 797.3768313 | 271.7240004 | 1443.837143 | 186.2989828 | 96.25935162 |
| 17066 | 98.15664609 | 33.72052363 | 215.0885714 | 53.79859336 | 96.25935162 |
| 23687 | 3345.324444 | 1382.257243 | 7377.175714 | 1444.234973 | 96.25935162 |
| 20812 | 1511.57249 | 561.539999 | 2893.697143 | 338.0689935 | 96.13466334 |
| 815 | 1320.18214 | 490.833371 | 2569.515714 | 392.7361894 | 96.00997506 |
| 15876 | 1311.420782 | 462.6508596 | 2416.09 | 321.7240623 | 96.00997506 |
| 16918 | 1453.174733 | 600.1195123 | 3050.62 | 559.0751988 | 96.00997506 |
| 10971 | 41.39814815 | 20.52713419 | 89.83857143 | 19.14333951 | 95.88528678 |
| 4594 | 96.26329218 | 56.87162938 | 34.98285714 | 8.56469831 | 95.88528678 |
| 18611 | 1884.292037 | 683.8558856 | 3369.444286 | 364.8119431 | 95.63591022 |
| 10684 | 634.5722634 | 194.941 2802 | 243.7285714 | 63.49565351 | 95.63591022 |
| 14944 | 58.02588477 | 31.88395661 | 147.6442857 | 46.06569253 | 95.51122195 |
| 17204 | 3058.224198 | 1371.907148 | 6358.744286 | 945.0767043 | 95.51122195 |
| 13161 | 121.0037654 | 66.35605552 | 5.641428571 | 12.79682569 | 95.51122195 |
| 600 | 302.8107202 | 61.35003616 | 213.4528571 | 13.31856188 | 95.26184539 |
| 2413 | 550.3817078 | 157.9279858 | 393.6171429 | 25.89780539 | 95.26184539 |
| 20484 | 5276.654918 | 3057.15583 | 11538.15714 | 2130.598132 | 95.26184539 |
| 2418 | 132.1191358 | 59.23141538 | 253.6085714 | 33.20308943 | 95.26184539 |
| 961 | 106.1441975 | 72.02636277 | 198.4485714 | 29.59039114 | 95.26184539 |
| 22717 | 660.8265226 | 261.2636841 | 213.93 | 65.08793052 | 95.26184539 |
| 19452 | 209.6715638 | 157.5847402 | 375.5571429 | 58.84777983 | 95.13715711 |
| 3271 | 449.0984979 | 108.7471593 | 281.7471429 | 23.07254625 | 95.13715711 |
| 21945 | 218.1630041 | 109.3266587 | 448.4914286 | 101.8108389 | 95.13715711 |
| 4499 | 719.5167901 | 247.3565527 | 1216.784286 | 136.5163842 | 95.13715711 |
| 1218 | 63.7545679 | 32.64389831 | 29.65 | 5.581594754 | 95.13715711 |
| 10821 | 28.84495885 | 92.35105778 | 195.0385714 | 76.96438774 | 95.13715711 |
| 16613 | 96.69055556 | 35.6771092 | 39.28285714 | 12.23417306 | 95.01246883 |
| 17305 | 3852.408107 | 1893.75281 | 7999.945714 | 1186.256538 | 94.88778055 |
| 25354 | −8.257839506 | 17.0880336 | 20.40571429 | 4.437070569 | 94.88778055 |
| 3698 | 33.28786008 | 27.43589635 | 80.73 | 13.43121737 | 94.76309227 |
| 14345 | 77.20395062 | 46.0865573 | 126.7142857 | 13.59995693 | 94.63840399 |
| 52 | 73.23440329 | 32.77127365 | 41.34571429 | 6.458371459 | 94.63840399 |
| 18272 | 91.36792181 | 61.71129822 | 224.0171429 | 54.62458016 | 94.51371571 |
| 17155 | 550.6687243 | 206.3019369 | 1013.405714 | 154.9823162 | 94.51371571 |
| 10878 | 1540.94323 | 698.826885 | 2431.565714 | 292.1649588 | 94.38902743 |
| 23816 | 25.7423251 | 31.57965814 | 91.71714286 | 17.98398242 | 94.38902743 |
| 14257 | 278.4844239 | 118.5763469 | 95.20571429 | 43.19293031 | 94.26433915 |
| 18271 | 366.7478189 | 234.4263298 | 758.8957143 | 120.4147542 | 94.13965087 |
| 10348 | 42.71962963 | 22.74256127 | 90.58 | 27.06055309 | 94.13965087 |

[0194] TABLE 5F
CLENBUTEROL Attorney Docket No. 44921-5090US
Timepoint(s): 6, 24 hrs Document No. 1828250.1

| Identifier | NonToxMean | NonToxSD | ToxMean | ToxSD | LDA score |
|---|---|---|---|---|---|
| 15002 | 370.7732305 | 762.3101051 | 857.3685714 | 201.3203655 | 98.12967581 |
| 15003 | 111.9262757 | 226.4263127 | 803.4357143 | 204.423891 | 97.75561097 |
| 15004 | 352.0210082 | 330.3718172 | 1485.817143 | 313.2749957 | 97.63092269 |
| 1114 | 289.5106996 | 128.09997 | 616.3842857 | 115.4233377 | 96.63341646 |
| 10654 | 167.5170576 | 183.1920641 | 342.4728571 | 116.8456235 | 96.13466334 |
| 23015 | 76.27308642 | 26.56987258 | 149.2642857 | 33.70650227 | 96.13466334 |
| 3799 | 363.2015226 | 137.4649001 | 592.75 | 88.40371862 | 94.76309227 |
| 22445 | 187.4601852 | 96.30841724 | 346.9 | 73.06204008 | 93.89027431 |
| 8598 | 92.98133745 | 30.67544775 | 122.1057143 | 4.580188705 | 93.76558603 |
| 6353 | 1105.17216 | 361.2250369 | 1556.151 | 84.84804712 | 93.51620948 |
| 3518 | 397.6903909 | 137.6434541 | 634.0728571 | 71.35343666 | 93.3915212 |
| 19048 | 63.7594856 | 27.04252873 | 26.51285714 | 6.722062467 | 93.3915212 |
| 23731 | 158.5925309 | 56.30608791 | 242.5957143 | 29.07243417 | 93.26683292 |
| 19074 | 424.6941152 | 99.82039291 | 593.8114286 | 57.41912208 | 93.26683292 |
| 19452 | 209.7605761 | 157.5451603 | 369.3771429 | 82.57209975 | 93.26683292 |
| 20743 | 149.177284 | 28.99798959 | 96.58142857 | 21.32392352 | 92.89216808 |
| 21996 | 261.8768519 | 104.143056 | 112.9628571 | 43.96131205 | 92.64339152 |
| 14982 | 4860.389568 | 2678.032152 | 8103.668571 | 940.6427668 | 92.39401496 |
| 8032 | 75.87524691 | 53.81786981 | 141.9471429 | 32.61585081 | 92.39401496 |
| 14989 | 629.8680453 | 200.2881357 | 891.6857143 | 101.9140749 | 92.26932668 |
| 1287 | 594.0475926 | 196.3334958 | 353.5457143 | 71.27292236 | 92.1446384 |
| 1809 | 32.34382716 | 58.37065997 | 293.4257143 | 129.594233 | 92.10901318 |
| 22043 | 102.109177 | 96.83781169 | 148.4242857 | 16.99378598 | 91.89526185 |
| 21661 | 1101.633868 | 485.7460291 | 1726.452857 | 226.0415466 | 91.64588529 |
| 25319 | 6920.877058 | 4634.32659 | 11059.19143 | 2293.2798 | 91.64588529 |
| 345 | 112.8551852 | 266.5500429 | 224.4 | 42.67381008 | 91.64588529 |
| 25050 | 4374.355391 | 2497.20802 | 6571.208571 | 1012.44378 | 91.64588529 |
| 23601 | 384.3886008 | 116.1146338 | 554.39 | 50.0575622 | 91.52119701 |
| 14981 | 5813.459815 | 3435.434206 | 9243.827143 | 1354.118299 | 91.39650873 |
| 15434 | 195.1638477 | 97.45664823 | 100.8371429 | 16.67855281 | 91.39650873 |
| 21527 | 75.16168724 | 45.20590689 | 106.3257143 | 15.41491362 | 91.39650873 |
| 11114 | 40.55353909 | 38.70912826 | 237.0042857 | 146.076882 | 91.36088351 |
| 4770 | 180.5046091 | 60.88092848 | 267.2942857 | 27.91134468 | 91.14713217 |
| 6015 | 120.4807407 | 40.49804833 | 65.17285714 | 17.13646669 | 91.14713217 |
| 13480 | 185.4077984 | 139.8113369 | 107.6842857 | 9.097274055 | 91.14713217 |
| 20582 | 450.8917901 | 111.5774689 | 336.2228571 | 39.54263678 | 91.14713217 |
| 19454 | 332.32 | 191.2144958 | 589.4842857 | 109.3836124 | 91.02244389 |
| 6100 | 1768.235638 | 676.3611509 | 2666.937143 | 328.8918907 | 90.89775561 |
| 23139 | 888.9618724 | 281.9240049 | 731.6957143 | 30.00259925 | 90.89775561 |
| 4969 | −15.96524691 | 53.65377688 | 190.3014286 | 104.7143313 | 90.86213039 |
| 14983 | 6685.244938 | 4598.068119 | 10386.47286 | 2329.410815 | 90.64837905 |
| 25439 | 4368.391687 | 2826.996699 | 6802.121429 | 1259.273538 | 90.64837905 |
| 20859 | 5537.508374 | 3107.487037 | 7833.655714 | 691.3458646 | 90.52369077 |
| 18313 | 2294.341728 | 1076.241882 | 3669.408571 | 557.9740799 | 90.39900249 |
| 21152 | 6045.10216 | 3947.773763 | 9826.062857 | 1984.203876 | 90.39900249 |
| 15666 | 4273.786008 | 2282.850009 | 7078.084286 | 1502.015073 | 90.39900249 |
| 21079 | 621.3493621 | 190.0544448 | 903.9914286 | 181.3617693 | 90.39900249 |
| 10829 | 53.25578189 | 32.17850139 | 94.72857143 | 14.33844765 | 90.39900249 |
| 14862 | 173.56107 | 103.8304052 | 313.7571429 | 41.23265684 | 90.27431421 |
| 8886 | 150.7763374 | 36.02695349 | 197.3885714 | 13.45373359 | 90.27431421 |
| 25650 | 65.36985597 | 81.73459012 | 27.37285714 | 3.678630698 | 90.14962594 |
| 10097 | 115.1417284 | 36.54092976 | 80.26428571 | 11.00299029 | 90.14962594 |
| 18400 | 35.27985597 | 14.3952905 | 24.98571429 | 1.97574338 | 90.02493766 |
| 4242 | 223.0401029 | 79.47610213 | 141.5642857 | 28.33963588 | 89.90024938 |
| 23632 | 119.0809053 | 55.29789649 | 269.0771429 | 76.56900172 | 89.86462415 |
| 10684 | 633.1000412 | 197.1977869 | 345.9428571 | 115.571451 | 89.7755611 |
| 10020 | 107.3964403 | 54.06388278 | 234.8757143 | 59.68441082 | 89.73993587 |
| 20484 | 5335.127654 | 3144.056813 | 7478.478571 | 887.0682476 | 89.65087282 |
| 9084 | 47.74730453 | 20.27875282 | 23.58428571 | 5.660526646 | 89.65087282 |
| 19071 | 65.65384774 | 40.19826257 | 166.9 | 26.36572586 | 89.49055932 |
| 19145 | 352.1509259 | 86.22845731 | 430.0128571 | 13.94929235 | 89.40149626 |
| 16074 | 179.5921605 | 44.12121825 | 149.5614286 | 9.893212199 | 89.40149626 |
| 6655 | 47.39563786 | 45.76462342 | 75.70285714 | 63.85409768 | 89.36587104 |
| 11485 | 147.5652469 | 63.95343317 | 94.19 | 10.3080163 | 89.27680798 |
| 16130 | 5073.927263 | 3229.765392 | 7856.3 | 1434.059483 | 89.27680798 |
| 19256 | 388.9738889 | 155.386905 | 263.9557143 | 32.81897919 | 89.1521197 |
| 16613 | 96.35598765 | 36.11198381 | 62.51142857 | 9.952628511 | 89.1521197 |
| 20872 | 1267.149588 | 381.2549453 | 1749.421429 | 210.9154919 | 89.02743142 |
| 6843 | 227.6846296 | 126.3785005 | 323.74 | 37.41478407 | 89.02743142 |
| 3016 | 3546.519774 | 1779.472329 | 5154.142857 | 502.8494973 | 89.02743142 |
| 4130 | 223.36393 | 91.7292491 | 137.9271429 | 35.95580422 | 88.90274314 |
| 20944 | 391.7425514 | 111.4665412 | 519.79 | 57.30979817 | 88.90274314 |
| 12542 | 193.5654938 | 67.02161167 | 277.7957143 | 32.18979075 | 88.90274314 |
| 6606 | 1847.296523 | 927.5598068 | 3657.978571 | 955.8918461 | 88.86711792 |
| 5227 | 142.4888889 | 66.57666343 | 322.36 | 96.11474549 | 88.86711792 |
| 10498 | 1231.989856 | 469.1475752 | 1756.054286 | 236.0194512 | 88.77805486 |
| 21705 | 132.8482305 | 71.83874577 | 48.9 | 41.86501563 | 88.77805486 |
| 17736 | 557.2155556 | 368.3172294 | 1245.955714 | 344.7801629 | 88.74242964 |
| 23109 | 724.9338272 | 232.8308439 | 762.4342857 | 50.51037644 | 88.65336658 |
| 14554 | 103.3044444 | 36.04972964 | 69.87142857 | 8.746093278 | 88.5286783 |
| 17675 | 276.5611317 | 83.82010501 | 230.74 | 18.6991408 | 88.5286783 |
| 15626 | 1554.498724 | 554.6532886 | 2088.282857 | 269.7848761 | 88.5286783 |
| 18108 | 161.9191358 | 27.31024814 | 189.0414286 | 11.60434894 | 88.40399002 |
| 20975 | 151.1588477 | 43.90183399 | 101.5428571 | 15.55203064 | 88.40399002 |
| 22615 | 71.49800412 | 120.413319 | 168.23 | 77.57154418 | 88.3683648 |
| 15886 | 399.2487654 | 123.4960866 | 506.9228571 | 28.74756495 | 88.27930175 |
| 7273 | 43.3237037 | 16.16773292 | 35.15285714 | 2.460641612 | 88.27930175 |

[0195] TABLE 5G
ISOPROTERENOL Attorney Docket No. 44921-5090US
Timepoint(s): 3, 6, 24 hrs Document No. 1828250.1

| Identifier | NonToxMean | NonToxSD | ToxMean | ToxSD | LDA score |
|---|---|---|---|---|---|
| 6606 | 1800.953354 | 841.8089691 | 4533.411538 | 976.4774713 | 97.34177215 |
| 15002 | 362.1182917 | 761.5650645 | 952.3530769 | 353.3322857 | 94.38169426 |
| 2069 | 330.4443333 | 99.06165286 | 528.5230769 | 63.4645261 | 94.30379747 |
| 15004 | 340.5709583 | 304.91227 | 1385.297692 | 580.7340909 | 94.25511198 |
| 15003 | 101.0504792 | 194.3109826 | 885.8453846 | 459.6024724 | 94.25511198 |
| 22321 | 175.5143542 | 95.44895753 | 480.2076923 | 181.5534099 | 92.86270691 |
| 1892 | 1014.269417 | 431.5795254 | 2036.402308 | 441.2482924 | 92.3563778 |
| 23964 | 87.10035417 | 36.01308076 | 146.31 | 28.23942693 | 92.27848101 |
| 24246 | 258.3080625 | 103.8022036 | 420.2730769 | 76.96344569 | 91.89873418 |
| 3959 | 385.6767292 | 112.3892003 | 643.9315385 | 134.1636163 | 91.85004869 |
| 18313 | 2264.4315 | 1049.245188 | 4139.14 | 636.8504939 | 90.83739046 |
| 3669 | 24.24370833 | 25.41941681 | 61.18692308 | 13.12603735 | 90.07789679 |
| 4969 | −15.42985417 | 58.24869563 | 75.33307692 | 46.63097672 | 90.0292113 |
| 23709 | 1016.678979 | 330.0606558 | 1487.833846 | 307.0387944 | 89.57156767 |
| 19840 | 1354.720813 | 457.9859582 | 2096.473846 | 395.7357092 | 89.31840312 |
| 20743 | 149.6088542 | 28.98896918 | 104.9215385 | 12.37454029 | 89.06523856 |
| 17736 | 547.4900833 | 358.0131362 | 1287.17 | 348.8565629 | 88.88997079 |
| 1159 | 105.747 | 38.69650897 | 63.84769231 | 15.54218729 | 88.60759494 |
| 14737 | 224.8601458 | 64.13600274 | 339.1892308 | 59.31126628 | 88.55890944 |
| 574 | 564.377375 | 209.6574783 | 1093.738462 | 264.717403 | 88.51022395 |
| 17734 | 894.7706667 | 475.7469159 | 1926.886923 | 478.4763098 | 88.51022395 |
| 22432 | 117.4335417 | 48.45540046 | 220.7423077 | 46.81354792 | 88.51022395 |
| 4420 | 432.5164792 | 132.8366231 | 282.9146154 | 47.80957394 | 88.17916261 |
| 25050 | 4367.979354 | 2513.148279 | 5792.699231 | 1037.709475 | 88.10126582 |
| 7414 | 286.8900208 | 63.9356574 | 435.0638462 | 95.41052689 | 87.87731256 |
| 15510 | 258.4175833 | 78.34841326 | 171.8730769 | 39.83706825 | 87.79941577 |
| 23123 | 313.5087083 | 106.6805904 | 539.3753846 | 168.5141659 | 87.624148 |
| 18172 | 56.3719375 | 32.08588383 | 92.37615385 | 20.41992635 | 87.34177215 |
| 15277 | 746.0483958 | 180.8008198 | 991.1115385 | 163.9308576 | 87.29308666 |
| 2742 | 62.1860625 | 78.24081855 | −112.1046154 | 118.687108 | 87.24440117 |
| 15840 | 45.2428125 | 31.12066696 | 21.56230769 | 4.773264351 | 87.16650438 |
| 3417 | 436.0942917 | 135.1741359 | 646.2084615 | 94.274477 | 87.0399221 |
| 17161 | 210.4053333 | 114.7786226 | 702.9215385 | 445.4059396 | 86.81596884 |
| 10185 | 36.474875 | 19.37632107 | 17.75615385 | 5.00987448 | 86.58227848 |
| 11531 | 367.8715625 | 247.9511191 | 984.9476923 | 415.6048795 | 86.43622201 |
| 12118 | 525.9024375 | 286.5326737 | 1465.937692 | 830.3963866 | 86.43622201 |
| 6727 | 144.8295625 | 38.96930285 | 96.43692308 | 14.21936847 | 86.40701011 |
| 16001 | 7345.807333 | 4838.698104 | 11675.05923 | 2291.390292 | 86.28042843 |
| 25689 | 1079.736667 | 440.6276535 | 1835.08 | 326.588564 | 86.28042843 |
| 1435 | 850.562875 | 227.4687537 | 1162.532308 | 75.79278167 | 85.97857838 |
| 20086 | 339.539 | 144.1424378 | 609.0123077 | 127.8668778 | 85.85199611 |
| 17477 | 68.31060417 | 75.88876388 | 109.0323077 | 48.77181976 | 85.72541383 |
| 6477 | 5.359333333 | 15.35545886 | 22.17461 538 | 16.11649653 | 85.67672833 |
| 17735 | 989.8021875 | 537.5096938 | 2383 | 662.4920784 | 85.55014606 |
| 1714 | 174.2624792 | 56.10541512 | 124.7115385 | 23.63710496 | 85.52093476 |
| 16092 | 360.0260417 | 151.5217582 | 591.7107692 | 142.5327169 | 85.52093476 |
| 21624 | 2033.794917 | 921.0432897 | 3697.166154 | 1089.50728 | 85.47224927 |
| 8495 | 127.1643333 | 44.65774149 | 168.53 | 25.3563848 | 85.44303797 |
| 18859 | 95.7876875 | 32.60736678 | 61.36307692 | 16.69836339 | 85.39435248 |
| 16533 | 300.4727917 | 119.4261477 | 496.9438462 | 129.0346388 | 85.34566699 |
| 17949 | 237.7122292 | 81.85675264 | 366.7838462 | 47.06676739 | 85.34566699 |
| 15089 | 120.1443333 | 52.12069944 | 203.1538462 | 65.88051654 | 85.34566699 |
| 11684 | 172.3714167 | 64.35917746 | 93.21230769 | 32.84176943 | 85.2677702 |
| 5458 | 156.57825 | 68.43444463 | 290.8907692 | 49.90688137 | 85.09250243 |
| 15365 | 1018.750083 | 343.2321479 | 1480.175385 | 235.1792331 | 85.01460565 |
| 1606 | 40.3269375 | 19.28859363 | 32.19923077 | 4.513729909 | 84.93670886 |
| 14397 | 75.95272917 | 52.19745226 | 171.3492308 | 54.78632029 | 84.83933788 |
| 14126 | −12.87691667 | 41.57314317 | 52.57692308 | 43.59800079 | 84.83933788 |
| 11404 | 98.37770833 | 44.48352439 | 188.2038462 | 46.46541878 | 84.79065239 |
| 4944 | 101.6122083 | 43.04690565 | 202.1107692 | 61.72363492 | 84.79065239 |
| 18403 | 2207.970875 | 927.6718268 | 2522.709231 | 214.4526646 | 84.43037975 |
| 17401 | 659.922375 | 472.3825853 | 1060.563846 | 329.8673005 | 84.03115871 |
| 20057 | 25.6423125 | 28.07360317 | 39.74769231 | 9.578609984 | 84.00194742 |
| 25439 | 4352.672708 | 2836.742218 | 6259.254615 | 1468.846717 | 83.87536514 |
| 4074 | 66.60789583 | 51.21037266 | 1.167692308 | 21.81347602 | 83.87536514 |
| 18529 | 295.4269792 | 102.4645218 | 459.8169231 | 84.03101524 | 83.82667965 |
| 9720 | 58.4780625 | 27.10112016 | 114.7053846 | 55.47800504 | 83.77799416 |
| 21152 | 6031.195688 | 3970.47468 | 8594.473846 | 1968.859692 | 83.74878286 |
| 22717 | 656.7182708 | 267.8686827 | 571.8792308 | 63.22450085 | 83.74878286 |
| 20448 | 80.24770833 | 108.8299206 | 515.7284615 | 404.6230235 | 83.72930867 |
| 6043 | 46.586875 | 26.67707328 | 82.86538462 | 18.27293336 | 83.70009737 |
| 15032 | 40.13775 | 16.13252205 | 30.22692308 | 7.604412518 | 83.67088608 |
| 15741 | 279.19375 | 92.18165366 | 220.4023077 | 29.92799112 | 83.67088608 |
| 20848 | 1339.717271 | 436.8491685 | 1875.133077 | 329.9010208 | 83.62220058 |
| 22578 | 233.7812083 | 97.26518768 | 366.1269231 | 104.8709029 | 83.57351509 |
| 18830 | 3838.6645 | 1335.735088 | 6680.843077 | 2106.098773 | 83.5248296 |
| 17305 | 3870.303771 | 1954.445915 | 5424.934615 | 718.797816 | 83.49561831 |
| 17204 | 3073.473479 | 1424.8566621 | 4272.376923 | 474.0101731 | 83.49561831 |
| 3822 | 697.3917292 | 234.9086936 | 1196.067692 | 338.7275933 | 83.39824732 |
| 8919 | 223.3019167 | 55.93447508 | 314.5523077 | 34.97798025 | 83.32035054 |
| 9929 | 222.790625 | 86.93019568 | 157.6746154 | 23.94974273 | 83.29113924 |
| 21785 | 91.6991875 | 41.01657742 | 167.7553846 | 45.87078675 | 83.27166504 |
| 15837 | 513.2281875 | 149.8040944 | 723.5046154 | 109.1594744 | 83.24245375 |
| 20449 | 103.2453958 | 167.2783907 | 701.81 | 549.4084078 | 83.22297955 |
| 13382 | 134.4617708 | 68.16933521 | 70.797692311 | 33.81142069 | 83.16455696 |
| 11137 | 1708.081146 | 672.1168288 | 2312.163846 | 292.5725507 | 83.16455696 |
| 7941 | 146.1314375 | 73.11194489 | 310.5623077 | 103.0019034 | 83.14508277 |
| 14390 | 88.9756875 | 35.05866141 | 73.76153846 | 8.114264031 | 83.11587147 |
| 14494 | 220.109125 | 57.14414432 | 174.4023077 | 25.75250478 | 83.11587147 |
| 9059 | 279.2145 | 101.1511552 | 428.9946154 | 88.0439283 | 83.06718598 |
| 15841 | 52.17541667 | 26.06232737 | 75.34 | 15.9500559 | 83.06718598 |
| 17195 | 572.3617292 | 139.5046295 | 734.0430769 | 72.94451903 | 82.98928919 |
| 21101 | 48.02770833 | 47.96669222 | 76.54307692 | 24.39873371 | 82.98928919 |
| 23731 | 157.1883958 | 54.41178011 | 255.67 | 64.86708654 | 82.89191821 |
| 25806 | 49.2876875 | 11.70393941 | 35.52153846 | 7.93145725 | 82.86270691 |
| 16847 | 970.4330833 | 347.2918939 | 1382.567692 | 209.2795291 | 82.86270691 |
| 10532 | 63.6660625 | 28.75410722 | 97.56846154 | 22.81496725 | 82.81402142 |
| 10780 | 177.7290208 | 67.53442396 | 268.5346154 | 45.48876887 | 82.81402142 |
| 17563 | 1505.677375 | 501.166256 | 2170.345385 | 344.9394213 | 82.81402142 |

[0196] TABLE 5H
NOREPINEPHRINE Attorney Docket No. 44921-5090US
Timepoint(s): 3, 6, 24 hrs Document No. 1828250.1

| Identifier | NonToxMean | NonToxSD | ToxMean | ToxSD | LDA score |
|---|---|---|---|---|---|
| 20826 | 258.7765145 | 73.83046558 | 8.665454545 | 5.441719147 | 100 |
| 18831 | 2701.02971 | 902.4997428 | 12.83 | 17.86234867 | 100 |
| 168 | 2667.635685 | 650.4891795 | 367.9990909 | 88.51448655 | 100 |
| 15876 | 1357.014232 | 440.9642379 | 16.57 | 3.755039281 | 100 |
| 16953 | 11191.077344 | 379.7935463 | 9.108181818 | 4.834130363 | 100 |
| 11849 | 1865.7830705 | 248.1407998 | 20.31 | 8.51322853 | 100 |
| 15492 | 1292.0097095 | 82.35511783 | 13.51 | 11.36765323 | 100 |
| 7888 | 324.7854979 | 75.98150734 | 40.00181818 | 20.22509472 | 100 |
| 15626 | 1597.37305 | 509.1606259 | 15.50454545 | 7.333530342 | 100 |
| 18682 | 514.2239004 | 145.6935245 | 31.97 | 7.347626828 | 100 |
| 15843 | 380.979917 | 98.04058409 | 41.20727273 | 15.37995129 | 100 |
| 18686 | 824.6674481 | 257.1839854 | 12.93545455 | 4.370193048 | 100 |
| 15345 | 172.306805 | 58.27631348 | −35.76818182 | 9.988857611 | 100 |
| 17358 | 1863.2689 | 558.8049123 | 43.91818182 | 15.50249452 | 100 |
| 3203 | 313.5804772 | 81.62083102 | 41.95272727 | 10.88050283 | 100 |
| 18318 | 1165.68083 | 348.3546489 | 2.997272727 | 9.69866495 | 100 |
| 2096 | 2451.416369 | 695.361932 | 32.81909091 | 39.101207 | 100 |
| 10227 | 823.3695228 | 258.3265781 | −72.06363636 | 25.16414206 | 100 |
| 23978 | 153.6884232 | 40.89784476 | 15.28727273 | 8.150722779 | 100 |
| 1580 | 636.5954772 | 179.4959326 | 16.11 | 14.35383085 | 100 |
| 20984 | 546.2710996 | 155.5949645 | −31.04 | 14.24214029 | 100 |
| 968 | 121 .9038382 | 30.64176184 | −0.500909091 | 6.679936309 | 100 |
| 20385 | 770.4556224 | 203.3023468 | 45.79090909 | 22.17806099 | 100 |
| 13596 | 1810.789336 | 569.1435287 | 3.454545455 | 6.840249065 | 100 |
| 20243 | 129.0574689 | 37.6968512 | −2.9 | 5.883240604 | 100 |
| 21816 | 260.0651037 | 74.61300111 | −1.751818182 | 7.742645308 | 100 |
| 16038 | 2615.561763 | 767.9946959 | 24.85 | 14.65344874 | 100 |
| 23300 | 880.673278 | 226.537123 | 50.66 | 38.86598822 | 100 |
| 8789 | 506.2074896 | 143.295597 | 14.34090909 | 15.86950563 | 100 |
| 9317 | 654.9811826 | 184.0629493 | 17.41454545 | 19.26111075 | 100 |
| 13420 | 403.804917 | 125.1092091 | −7.362727273 | 2.670884089 | 100 |
| 18160 | 1953.342905 | 669.0636466 | 2.142727273 | 3.021476761 | 100 |
| 730 | 146.8325934 | 41.118501 | −3.327272727 | 15.87339478 | 100 |
| 11531 | 1392.2085477 | 269.4537066 | 30.74090909 | 35.84799449 | 100 |
| 21211 | 1560.984502 | 496.0263201 | 13.86909091 | 11.47315428 | 100 |
| 10019 | 1140.5473237 | 45.77309846 | −30.74818182 | 8.831346237 | 100 |
| 8737 | 829.5111826 | 270.0174124 | 0.809090909 | 6.715150712 | 100 |
| 1514 | 225.5738174 | 115.6570504 | −33.27 | 21.5859042 | 100 |
| 5283 | 68.47738589 | 21.21791889 | −3.467272727 | 2.931996217 | 100 |
| 4670 | 983.1897303 | 268.442193 | 63.66727273 | 37.3271644 | 100 |
| 24765 | 8698.1611 | 2736.932551 | −107.0854545 | 118.6060407 | 100 |
| 6550 | 432.3638382 | 131.5445574 | −10.41636364 | 13.92439677 | 100 |
| 3202 | 386.2796888 | 107.8897806 | 29.91363636 | 17.24658649 | 100 |
| 3081 | 386.0928838 | 116.5134935 | −18.26181818 | 11.95994216 | 100 |
| 15957 | 337.8810581 | 103.8628968 | 2.243636364 | 6.556252394 | 100 |
| 15239 | 838.2483817 | 252.8998782 | 7.542727273 | 10.01967973 | 100 |
| 8829 | 262.205083 | 83.13534615 | −4.712727273 | 6.07799653 | 100 |
| 6291 | 102.256722 | 42.41222875 | −51.31636364 | 18.26697472 | 100 |
| 17100 | 1195.278278 | 362.7244946 | 27.93181818 | 13.41732374 | 100 |
| 4948 | 319.2764938 | 84.0755349 | 33.645454551 | 7.327518494 | 100 |
| 692 | 141.6327801 | 45.02646423 | −1.7272727271 | 3.0384736 | 100 |
| 16608 | 886.6689834 | 258.0808715 | 7.421 | 40.76969733 | 100 |
| 17380 | 546.1136515 | 142.0524293 | −50.93363636 | 78.15540177 | 100 |
| 17234 | 288.0742946 | 76.62794552 | 14.30363636 | 9.793244889 | 100 |
| 24185 | 79.67609959 | 21.07355559 | 4.180909091 | 3.012754403 | 100 |
| 6861 | 179.5580498 | 49.98628922 | 5.142727273 | 8.269084703 | 100 |
| 11066 | 291.9389627 | 89.63060929 | −11.11818182 | 6.621064594 | 100 |
| 18830 | 4002.810249 | 1320.092723 | 5.034545455 | 21.76197986 | 100 |
| 18215 | −13.02128631 | 27.8157068 | 116.2727273 | 18.53949411 | 100 |
| 7224 | 468.9245851 | 121.384228 | 45.83272727 | 22.3816653 | 100 |
| 17408 | 3033.101079 | 948.9602239 | −25.32181818 | 36.9366403 | 100 |
| 24783 | 139.1163693 | 39.73307083 | 5.153636364 | 2.656310497 | 100 |
| 15571 | 1161.553154 | 369.1839332 | −6.980909091 | 12.89713957 | 100 |
| 6927 | 550.1127178 | 154.4853899 | 24.69636364 | 25.61807498 | 100 |
| 24596 | 116.1997303 | 35.60561059 | −15.29363636 | 8.096082105 | 100 |
| 3549 | 102.1588797 | 27.48608017 | 4.924545455 | 4.636889828 | 100 |
| 15365 | 1054.916888 | 313.7007295 | −20.69272727 | 34.80709384 | 100 |
| 15308 | 264.0688382 | 78.16576449 | 17.53454545 | 16.16938735 | 100 |
| 24064 | 438.5977801 | 121.1468558 | 6.629090909 | 32.59995597 | 100 |
| 23705 | 257.5565145 | 72.23324097 | 12.20909091 | 7.991269554 | 100 |
| 23372 | 292.9917842 | 103.874663 | −86.64727273 | 33.45484392 | 100 |
| 2250 | 755.4497718 | 209.0912074 | 24.20636364 | 14.2096814 | 100 |
| 19408 | 1230.174647 | 382.1879294 | 4.725454545 | 14.95432136 | 100 |
| 18663 | 598.094668 | 164.4549192 | 3.831818182 | 8.740671391 | 100 |
| 23109 | 742.8126971 | 202.9740661 | −34.62181818 | 6.237901599 | 100 |
| 3254 | 200.6041079 | 137.1574 | 1086.558182 | 93.09191155 | 100 |
| 24528 | 37.71585062 | 168.6386969 | 1093.480909 | 136.4743304 | 100 |
| 25250 | 1227.876784 | 368.4067726 | −15.41181818 | 7.229391148 | 100 |
| 3046 | −91.81815353 | 101.5951868 | 683.6272727 | 290.0463678 | 100 |
| 17535 | 235.9384855 | 61.09067701 | 0.272727273 | 5.405567668 | 100 |
| 2131 | 152.2524896 | 47.30103826 | −23.71909091 | 8.362459512 | 100 |
| 18541 | 1514.294979 | 503.4161297 | −0.957272727 | 2.214023897 | 100 |
| 15103 | 330.838361 | 71.95446887 | 5.620909091 | 6.117156945 | 100 |
| 18358 | 389.3404772 | 84.80796568 | 56.13818182 | 21.38603087 | 100 |
| 23210 | 207.9242946 | 50.957339 | 12.97454545 | 8.530906591 | 100 |
| 2435 | 123.8113693 | 34.12545346 | 1.357272727 | 2.768819571 | 100 |
| 2254 | 190.9323651 | 53.97349834 | 1.659090909 | 3.713471299 | 100 |
| 21822 | 542.4963485 | 104.8273279 | 109.2954545 | 23.83776767 | 100 |
| 11936 | 533.6882988 | 146.0354132 | −29.16727273 | 32.27326265 | 100 |
| 22205 | 695.3240664 | 170.2714155 | 87.88818182 | 18.07752739 | 100 |
| 2103 | 2876.211846 | 769.3677303 | 16.01181818 | 16.50655313 | 100 |
| 17307 | 254.348527 | 66.81528147 | −33.49090909 | 6.670976622 | 100 |
| 11516 | 117.570083 | 49.71968898 | −26.68454545 | 15.52986244 | 100 |
| 2413 | 560.0561618 | 138.3695518 | 26.70545455 | 12.44173972 | 100 |
| 16538 | 285.3856224 | 74.85853067 | −12.47818182 | 6.74247257 | 100 |
| 15511 | 487.8557676 | 135.2102351 | 12.42090909 | 2.812619614 | 100 |
| 14928 | 904.0945021 | 252.3238249 | 15.91272727 | 12.98053242 | 100 |
| 20750 | 221.4425311 | 45.74314584 | 11.22636364 | 5.453324257 | 100 |
| 7427 | 408.6870332 | 93.45830495 | 13.85727273 | 9.079045204 | 100 |

[0197] TABLE 5I
EPINEPHRINE Attorney Docket No. 44921-5090US
Timepoint(s): 3, 6, 24 hrs Document No. 1828250.1

| Identifier | NonToxMean | NonToxSD | ToxMean | ToxSD | LDA score |
|---|---|---|---|---|---|
| 17734 | 888.2450722 | 418.3316328 | 2967.57375 | 919.3804659 | 97.875 |
| 11531 | 366.5253814 | 225.3556456 | 1452.2325 | 595.7111333 | 97.875 |
| 17736 | 542.5831959 | 312.8985462 | 2046.95 | 809.1560881 | 97.25 |
| 6585 | 711.781732 | 439.0153319 | 2196.87375 | 557.9498605 | 96.875 |
| 4098 | 118.7445979 | 63.79468172 | 309.755 | 107.3850764 | 96.5 |
| 385 | 47.90284536 | 22.42491611 | −1.535 | 7.489754907 | 95.375 |
| 21657 | 830.2778144 | 270.4242843 | 1288.78125 | 225.8066116 | 93.875 |
| 5458 | 157.4439588 | 68.27623153 | 322.3525 | 66.81148527 | 93.5 |
| 5227 | 143.2841443 | 69.29449686 | 251.66375 | 41.31225136 | 93.375 |
| 20041 | 164.6427629 | 82.38204257 | 313.96 | 49.87761737 | 93.25 |
| 2069 | 332.6504948 | 100.9144709 | 518.57375 | 79.72361649 | 92.625 |
| 15277 | 748.0543299 | 182.1555459 | 1022.66625 | 111.9218696 | 92.375 |
| 16017 | 117.0040206 | 26.56818581 | 79.4475 | 8.153501877 | 92.125 |
| 18654 | 207.2880825 | 76.29506097 | 104.18 | 38.72291422 | 91.625 |
| 22937 | 18.95884536 | 18.38238104 | 50.77875 | 11.76095166 | 91.625 |
| 15283 | 306.3364124 | 85.1441326 | 436.77125 | 57.95379032 | 91.375 |
| 17735 | 995.2225773 | 522.782963 | 2925.1375 | 973.5225995 | 91.25 |
| 6789 | 449.154701 | 138.2297816 | 359.835 | 27.13126241 | 91.125 |
| 2655 | 163.7682887 | 72.87378638 | 356.14 | 113.777997 | 91.125 |
| 22247 | 553.3174433 | 208.9330121 | 883.6025 | 221.399766 | 90.875 |
| 25717 | 50.10529897 | 34.58913722 | 19.7575 | 3.491445669 | 90.375 |
| 12376 | 1960.584433 | 624.6888448 | 1264.64 | 263.3373639 | 90.125 |
| 1892 | 1019.932247 | 428.2951523 | 2331.92625 | 591.4267078 | 90.125 |
| 14989 | 627.0824536 | 195.6606757 | 1027.835 | 168.3073491 | 90 |
| 17810 | 1493.767773 | 569.0764586 | 1603.45875 | 88.72371038 | 90 |
| 24209 | 21.31257732 | 81.64677329 | 122.2275 | 56.00067136 | 89.875 |
| 22042 | 96.09375258 | 70.77738592 | 131.2975 | 22.11521826 | 89.75 |
| 19710 | 53.04616495 | 26.30615046 | 122.3625 | 31.83640852 | 89.625 |
| 574 | 569.978701 | 216.8213901 | 1085.00875 | 293.1615851 | 89.5 |
| 8919 | 224.3806804 | 56.72687008 | 306.18375 | 34.96332648 | 89.375 |
| 9166 | 68.21876289 | 52.54762518 | 200.9225 | 94.02400662 | 89.375 |
| 17949 | 238.0037113 | 79.79173057 | 429.7825 | 104.2303763 | 89.375 |
| 17361 | 91.87804124 | 39.57467877 | 53.98125 | 9.356979729 | 89.375 |
| 20461 | 86.35030928 | 31.05618459 | 48.105 | 12.54410732 | 89.375 |
| 18389 | 775.2413196 | 506.6075311 | 1720.30875 | 416.281741 | 89.375 |
| 18313 | 2294.41367 | 1079.245371 | 3493.16375 | 482.7251869 | 89.25 |
| 12695 | 5.350185567 | 36.75666009 | 82.9525 | 38.93520139 | 89.25 |
| 12609 | 229.6410515 | 71 .4952706 | 331 .44875 | 38.34897147 | 88.875 |
| 1714 | 173.6201443 | 56.23925673 | 132.68375 | 15.0060054 | 88.625 |
| 4636 | 119.3749691 | 72.97797428 | 180.37625 | 24.15894152 | 88.5 |
| 15048 | 1617.959423 | 528.6993884 | 1750.94375 | 133.3480796 | 88.375 |
| 10071 | 265.9264742 | 134.3201197 | 479.4825 | 124.2355416 | 88.375 |
| 14149 | 131.0243711 | 89.55041357 | 221.705 | 45.87699828 | 88.375 |
| 15032 | 40.0965567 | 16.05370374 | 26.53 | 7.701617641 | 88.25 |
| 1483 | 27.79618557 | 22.28955541 | −3.34875 | 14.07984825 | 88.25 |
| 18018 | 764.9609072 | 193.4526605 | 979.63875 | 69.04549213 | 88.125 |
| 26164 | 80.68028866 | 33.33373002 | 111.5275 | 9.02472279 | 88.125 |
| 2742 | 60.12063918 | 82.15513864 | −95.82 | 62.86507934 | 88 |
| 14554 | 103.4118557 | 36.00705678 | 67.53875 | 10.90265818 | 87.875 |
| 8707 | 193.2597113 | 63.01577128 | 271.675 | 29.02663358 | 87.75 |
| 23240 | 442.1703918 | 137.4123052 | 518.92125 | 18.93327942 | 87.75 |
| 15949 | 281.7723505 | 72.62837121 | 352.95875 | 23.64593438 | 87.75 |
| 8494 | 451.5067423 | 171.6423091 | 607.5525 | 45.40360425 | 87.75 |
| 15181 | 160.2542268 | 47.84356903 | 150.69625 | 9.379378501 | 87.625 |
| 15603 | 45.94983505 | 37.69467445 | 42.9275 | 3.258236815 | 87.625 |
| 8495 | 127.0749278 | 43.9921576 | 199.80375 | 30.07248003 | 87.5 |
| 17947 | 140.6838763 | 54.78480727 | 245.63625 | 64.99176738 | 87.375 |
| 3405 | 251.0247835 | 79.63950605 | 421.23375 | 70.31434744 | 87.375 |
| 16154 | 122.7517732 | 309.7565389 | 168.96625 | 45.83850345 | 87.375 |
| 3669 | 24.59857732 | 25.52578984 | 62.7625 | 17.01112472 | 87.25 |
| 7941 | 149.1416082 | 78.32922502 | 230.84 | 33.51091038 | 87.25 |
| 12581 | 52.69251546 | 57.30569446 | 81.97875 | 29.11044606 | 87.125 |
| 20990 | 118.4963918 | 51.60603594 | 199.04125 | 46.08950219 | 87.125 |
| 22873 | 215.6249278 | 84.79180636 | 374.4175 | 84.61650291 | 87.125 |
| 13547 | 173.9781443 | 55.77956063 | 229.9025 | 19.9192095 | 87 |
| 5902 | 51.03164948 | 33.30889814 | 85.59875 | 17.2955068 | 86.875 |
| 18095 | 826.025134 | 210.4110436 | 1122.11875 | 133.4793588 | 86.875 |
| 16092 | 363.112268 | 154.8973929 | 549.41125 | 70.32665649 | 86.875 |
| 9277 | 49.07348454 | 18.38794729 | 83.37375 | 23.5619772 | 86.875 |
| 8822 | 131.5994227 | 84.01472082 | 198.895 | 48.51834322 | 86.75 |
| 4496 | 60.76754639 | 22.7136402 | 43.95875 | 7.690518165 | 86.75 |
| 24012 | 909.5962887 | 309.4378079 | 667.5625 | 86.87059337 | 86.5 |
| 20204 | 45.97138144 | 14.86260572 | 18.33625 | 13.96489674 | 86.5 |
| 7936 | 75.96758763 | 23.26395527 | 53.92625 | 8.149094494 | 86.5 |
| 19768 | 684.5306186 | 188.7390939 | 915.77 | 92.35212674 | 86.375 |
| 23155 | 219.8035258 | 63.23831524 | 303.14125 | 39.03249724 | 86.375 |
| 5703 | 189.27259791 | 73.01735577 | 255.63375 | 30.86881271 | 86.375 |
| 18774 | 67.780082471 | 32.25676833 | 41 .66375 | 6.299668784 | 86.25 |
| 3941 | 178.642268 | 74.52946804 | 299.69625 | 65.18136389 | 86.25 |
| 19320 | 108.0233196 | 34.25470953 | 97.82 | 5.847399911 | 86.125 |
| 22727 | 7269.390247 | 2432.77062 | 6112.755 | 594.1530463 | 86 |
| 2997 | 74.51882474 | 33.02943782 | 56.02875 | 8.847379656 | 86 |
| 12096 | 131.6709278 | 53.17077259 | 235.45125 | 57.54323255 | 86 |
| 8343 | 55.92898969 | 19.9088009 | 59.54125 | 3.826958649 | 86 |
| 10016 | 257.6524536 | 332.4004743 | 355.33625 | 79.38333001 | 86 |
| 1521 | 75.17245361 | 42.17580483 | 156.41125 | 41.7286354 | 85.875 |
| 2459 | 115.9692371 | 265.1998591 | 1327.6475 | 966.8365364 | 85.875 |
| 82 | 41.9002268 | 19.59839295 | 21.44375 | 6.478637285 | 85.75 |
| 17145 | 186.5703299 | 91.1146045 | 110.36875 | 29.37672813 | 85.75 |
| 22605 | 45.56035052 | 41.38235837 | 223.62375 | 129.4260965 | 85.625 |
| 19392 | 596.7033402 | 175.621725 | 834.42 | 135.9808925 | 85.625 |
| 21654 | 203.556433 | 94.47999788 | 448.57875 | 177.9926862 | 85.625 |
| 353 | 99.58771134 | 42.81116446 | 357.2475 | 264.3302602 | 85.625 |

We claim:

1. A method of predicting at least one toxic effect of a compound, comprising:
(a) preparing a gene expression profile of a tissue or cell sample exposed to the compound; and
(b) comparing the gene expression profile to a database comprising at least part of the data or information of Tables 5-5I.

2. A method of claim 1, wherein the gene expression profile prepared from the tissue or cell sample comprises the level of expression for at least one gene.

3. A method of claim 2, wherein the level of expression is compared to a Tox Mean and/or NonTox Mean value in Tables 5-5I.

4. A method of claim 3, wherein the level of expression is normalized prior to comparison.

5. A method of claim 1, wherein the database comprises substantially all of the data or information in Tables 5-5I.

6. A method of predicting at least one toxic effect of a compound, comprising:
(a) detecting the level of expression in a tissue or cell sample exposed to the compound of two or more genes from Tables 5-5I; wherein differential expression of the genes in Tables 5-5I is indicative of at least one toxic effect.

7. A method of predicting the progression of a toxic effect of a compound, comprising:
(a) detecting the level of expression in a tissue or cell sample exposed to the compound of two or more genes from Tables 5-5I; wherein differential expression of the genes in Tables 5-5I is indicative of toxicity progression.

8. A method of predicting the cardiotoxicity of a compound, comprising:
(a) detecting the level of expression in a tissue or cell sample exposed to the compound of two or more genes from Tables 5-5I; wherein differential expression of the genes in Tables 5-5I is indicative of cardiotoxicity.

9. A method of identifying an agent that modulates the onset or progression of a toxic response, comprising:
(a) exposing a cell to the agent and a known toxin; and
(b) detecting the expression level of two or more genes from Tables 5-5I; wherein differential expression of the genes in Tables 5-5I is indicative of toxicity.

10. A method of predicting the cellular pathways that a compound modulates in a cell, comprising:
(a) detecting the level of expression in a tissue or cell sample exposed to the compound of two or more genes from Tables 5-5I; wherein differential expression of the genes in Tables 5-5I is associated the modulation of at least one cellular pathway.

11. The method of any one of claims 6-10, wherein the expression levels of at least 3 genes are detected.

12. The method of any one of claims 6-10, wherein the expression levels of at least 4 genes are detected.

13. The method of any one of claims 6-10, wherein the expression levels of at least 5 genes are detected.

14. The method of any one of claims 6-10, wherein the expression levels of at least 6 genes are detected.

15. The method of any one of claims 6-10, wherein the expression levels of at least 7 genes are detected.

16. The method of any one of claims 6-10, wherein the expression levels of at least 8 genes are detected.

17. The method of any one of claims 6-10, wherein the expression levels of at least 9 genes are detected.

18. The method of any one of claims 6-10, wherein the expression levels of at least 10 genes are detected.

19. A method of claim 6 or 7, wherein the effect is selected from the group consisting of myocarditis, arrhythmias, tachycardia, myocardial ischemia, angina, hypertension, hypotension, dyspnea, and cardiogenic shock.

20. A method of claim 8, wherein the cardiotoxicity is associated with at least one heart disease pathology selected from the group consisting of myocarditis, arrhythmias, tachycardia, myocardial ischemia, angina, hypertension, hypotension, dyspnea, and cardiogenic shock.

21. A method of claim 10, wherein the cellular pathway is modulated by a toxin selected from the group consisting of cyclophosphamide, ifosfamide, minoxidil, hydralazine, BI-QT, clenbuterol, isoproterenol, norepinephrine, and epinephrine.

22. A set of at least two probes, wherein each of the probes comprises a sequence that specifically hybridizes to a gene in Tables 5-5I.

23. A set of probes according to claim 22, wherein the set comprises probes that hybridize to at least 3 genes.

24. A set of probes according to claim 22, wherein the set comprises probes that hybridize to at least 5 genes.

25. A set of probes according to claim 22, wherein the set comprises probes that hybridize to at least 7 genes.

26. A set of probes according to claim 22, wherein the set comprises probes that hybridize to at least 10 genes.

27. A set of probes according to any one of claims 22-26, wherein the probes are attached to a solid support.

28. A set of probes according to claim 27, wherein the solid support is selected from the group consisting of a membrane, a glass support and a silicon support.

29. A solid support comprising at least two probes, wherein each of the probes comprises a sequence that specifically hybridizes to a gene in Tables 5-5I.

30. A solid support of claim 29, wherein the solid support is an array comprising at least 10 different oligonucleotides in discrete locations per square centimeter.

31. A solid support of claim 29, wherein the array comprises at least about 100 different oligonucleotides in discrete locations per square centimeter.

32. A solid support of claim 29, wherein the array comprises at least about 1000 different oligonucleotides in discrete locations per square centimeter.

33. A solid support of claim 29, wherein the array comprises at least about 10,000 different oligonucleotides in discrete locations per square centimeter.

34. A computer system comprising:
(a) a database containing information identifying the expression level in a tissue or cell sample exposed to a cardiotoxin of a set of genes comprising at least two genes in Tables 5-5I; and
(b) a user interface to view the information.

35. A computer system of claim 34, wherein the database further comprises sequence information for the genes.

36. A computer system of claim 34, wherein the database further comprises information identifying the expression level for the set of genes in the tissue or cell sample before exposure to a cardiotoxin.

37. A computer system of claim 34, wherein the database further comprises information identifying the expression level of the set of genes in a tissue or cell sample exposed to at least a second cardiotoxin.

38. A computer system of any of claims 34-37, further comprising records including descriptive information from an external database, which information correlates said genes to records in the external database.

39. A computer system of claim 38, wherein the external database is GenBank.

40. A method of using a computer system of any one of claims 34-37 to present information identifying the expression level in a tissue or cell of at least one gene in Tables 5-5I, comprising:
comparing the expression level of at least one gene in Tables 5-5I in a tissue or cell exposed to a test agent to the level of expression of the gene in the database.

41. A method of claim 40, wherein the expression levels of at least two genes are compared.

42. A method of claim 40, wherein the expression levels of at least five genes are compared.

43. A method of claim 40, wherein the expression levels of at least ten genes are compared.

44. A method of claim 40, further comprising the step of displaying the level of expression of at least one gene in the tissue or cell sample compared to the expression level when exposed to a toxin.

45. A method of claim 9, wherein the known toxin is a cardiotoxin.

46. A method of claim 42, wherein the cardiotoxin is selected from the group consisting of cyclophosphamide, ifosfamide, minoxidil, hydralazine, BI-QT, clenbuterol, isoproterenol, norepinephrine, and epinephrine.

47. A method of any one of claims 6-10, wherein nearly all of the genes in Tables 5-5I are detected.

48. A method of claim 47, wherein all of the genes in at least one of Tables 5-5I are detected.

49. A kit comprising at least one solid support of any one of claims 29-33 packaged with gene expression information for said genes.

50. A kit of claim 49, wherein the gene expression information comprises gene expression levels in a tissue or cell sample exposed to a cardiotoxin.

51. A kit of claim 50, wherein the gene expression information is in an electronic format.

52. A method of any one of claims 6-10, wherein the compound exposure is in vivo or in vitro.

53. A method of any one of claims 6-10, wherein the level of expression is detected by an amplification or hybridization assay.

54. A method of claim 53, wherein the amplification assay is quantitative or semi-quantitative PCR.

55. A method of claim 53, wherein the hybridization assay is selected from the group consisting of Northern blot, dot or slot blot, nuclease protection and microarray assays.

56. A method of identifying an agent that modulates at least one activity of a protein encoded by a gene in Tables 5-5I comprising:
(a) exposing the protein to the agent; and
(b) assaying at least one activity of said protein.

57. A method of claim 56, wherein the agent is exposed to a cell expressing the protein.

58. A method of claim 57, wherein the cell is exposed to a known toxin.

59. A method of claim 58 wherein the toxin modulates the expression of the protein.

The application's sequence listing, which the Patent Office published only in electronic form, follows.

SEQUENCE LISTING (1140 sequences)

SEQ ID NO: 1 - DNA, 6849 bp, Rattus norvegicus
  Genbank Accession No. J01435
  misc_feature (1)..(6849): n = a or c or g or t
ccctcacagtattaagtacccttaccctaccgctttcctcccaactaatcacatagaagtttaggatatacagttcaagagccttcaaagcccttagaaaacaaacaagtttaacttctgataaggactgtaagactatatcttacatctgttaaatgcaaatcaactgctttaattaagctaaatcctcaactagattggaaggattcaaacctacgaaaatttagttaacaactaaataccctacttactggcttcaatctacttctcccgcctatcagaaaagaggcgggagaagccttagtagaggagattctctacaccttccaatttgcaattcgacatgataatcaccttaaggctttttggtaaaaagggggctcaacccctgtctttagatttacagtctaatgcttactcagccattttacctatgttcgtaaacggttgactcttttcaactaaccctaaagatatcggaaccctctacctattatttggagcctgagcaggaatagtagggacagctttaagtattctaattcgagctgaactaggacagctaggcgcactcctaggagatgaccaaatctataatgtcctcgtcacagcccatgcattcgtaataattttctttatagtaatacctataataattggaggcttcggaaactgacttgtaccactaataattggagcccctgatatagcattcccacgaataaataacataagcttttgactgcttcctccatcatttctactccttttagcatcctccatagtagaagctggagctggaacaggatgaacagtatatccccccttagccggaaacctagcccatgctggggtatccgtagatttaactattttttccctccacctagccggggtgtcttctatcttaggagctatcaactttatcaccactatcattaatataaaaccccctgctataacccaatatcagacacctctctttgtatgatccgtactaattacagccgtcctactacttctctcactgccagtattagcagcaggtatcactatactccttacagaccgaaatctaaatactactttcttcgaccccgctggaggcggaggcccaattctttatcaacacctattctgattcttcggccacccagaagtgtacatcttaattcttctagggtttgaaattatttcacatgtagttacctattactctggaaaaaaagaacccttcggatatataggtatggtatgaaccataatatctattggcttcctaggatttattgtatgagcacatcacatattcactgtaggcctggatgtagacacccgagcctactttacatctgccactataattatcgcaattcctacaggcgtaaaagtattcagctgactcgctacactacatggaggaaatatcaaatgatcccccgccatattatgagccttagggtttatcttcttattcacagtagggggcctaacagggatcgtactatctaactcatcccttgacattgtacttcatgatacatactacgtagtagctcacttccactatgtcttatctataggagcagtattcgccatcatagcttgcttcgtccactgattcccactattctcaggctataccctaaatgacacatgagcaaaagccctctttgccattatatttgtaggtgtaaacataacattttttcctcaacacttcctaggattagcagggatacctcgtcgttactctgattatccagatgcttataccacatgaaatacagtctcctctataggctcattcatctcacttacggccgtccttgtaatgatcttcatgatttgagaagccttcgcatcaaaacgagaagtgctctcaatttcctactcttcaactaacctagaatgactgcatggatgccccccaccttaccacacattcgaagaaccttcctatgtaaaagttaaataagaaaggaaggattcgaaccccctacaactggtttcaagccaatttcataaccattatgtctttctcaatgagatattagtaaaataattacataaccttgtcaaggttaagttatagacttaaatctatatatcttacatggcttacccatttcaacttggcttacaagacgccacatcaccaatcatagaagaacttacaaactttcatgaccacaccctaataattgtattcctcatcagctccctagtactttatattatttcactaatactaacaacaaaactaacacacacaagcacaatagacgcccangaagtagaaacaatttgaacaattctcccagctgtcattcttattctaatcgcccttccctccctacgaattctatacataatagacgagattaataacccagttctaacagtaaaaactataggacaccaatgatactgaagctatgaatatactgactatgaagacctatgctttgactcctacataatcccaaccaatgacctaaaactaggtgaacttcgcttattagaagttgataatcgggtagtcttaccaatagaacttccaattcgtatactaatctcatccgaagacgtcctgcactcatgacccatcccttcactagggttaaaaaccgacgcaatccccggccgcctaaaccaagctacagtcacatcaaaccgactaggtctattctatggccaatgctctgaaatttgcggctcaaatcacagcttcatactcattgtactagaaatagtgcctctaaaatatttcgaaaactgatcagcttctataatttaaactcattgcgaagcttagagcgttaaccttttaagttaaagttagagacaacaaatctccacattgacatgccacaactagacacatccacatgatttattacaatcatctcctcaatagccacactatttaatttatttcaattaaaaatttcttcccaaacctttcctgcacctccctcacccaaaactatagccacagaaaaaacgaataacccttgagaatcaaaatgaacgaaaatctatttccctctttcattacccccacaataataggtctaccaattgttgtgaccattattatgttcccatcaattctattcccatcatcagaacgcctaatcagcaaccgactacactcatttcaacactgactaatcaaacttatcatcaaacaaataatgttaattcacacaccaaaaggacgaacctgagccctaataattgtatccctaattatatttatcggctcaaccaaccttctagggcttcttccccatacatttacccctaccactcagctatctataaacctaagcatagccatccccctatgagcaggagccgtaattctaggcttccgacacaaactaaaaaattctttagcccacttcttaccgcaaggaacccccatctcactaattcccatactaatcatcatcgaaactatcagcctatttattcaaccgatagcactagcagtacgactaacagcaaacattacagcaggccatctattaatgcatctaatcggaggagctaccctagtacttatagacatcagcccaccaaccgctacaattacatttattattctacttctacttacagtacttgaatttgtcgtagccttaattcaagcctatgtattcacccttctagtaagcctgtacctacatgataacacataatgacccaccaaacccatgcataccatatagtaaacccaagcccatgaccactaacaggagccctatcagctcttctactcacatccggcttagtaatatgattccattacaactccacaattctcctatcattaggcctcctgacaaacatcctaactatatatcaatgatgacgagatatcatccgtgaaggaacataccaaggccaccacacccctattgtacaaaaaggcctccgatacggaataatcctgtttattgtctccgaagtattcttctttgccggatttttctgagcattttatcattccagcctagttcctacccacgacctaggcggttgctgacccccaacaggaatcacccctttaaatcccctagaagtaccccttctaaatacatcagtcctcttagcatcaggagtctcaattacatgagcccatcacagcctaatagaaggcaaccgaaaccatataaaccaagccctactaatcaccattctcttaggattatatttcactatcttacaagcctcagagtatttcgaaacatcattttctatctcagacggaatttacggctcaacattcttcatagcaacgggatttcatggccttcacgtaattattggctcaactttcctaattgtctgtctactacgacaactaaaattccacttcacatcaaaacatcatttcggatttgaagccgcagcatgatactgacacttcgtagatgtagtttgactattcctatacgtttctatctattgatgaggatcctactcccttagtataaacaatacaactgacttccaatcagttaattctgaaaaaactcagaagagagtaattaacctacccattatcatcacaattaacatcaccttatcttttatcctcatttcaattgcattctgattgcctcaaataaacttatactccgaaaaagcaaacccatatgaatgtggcttcgacccaacaagttctgcacgccttcctttttcaataaaatttttcttagtagccattacatttctactattcgacctagaaatcgccttactacttcccctcccatgagcgattcaaacaaccaataccgctacaataatagcaactgcctttattttagtcactattttagctcttggcctaagctacgaatgaacacaaaaaggactagaatgaacagaataattggtaattagtttaaataaaattaatgatttcgactcattagattatgataataatcataattaccaacaatgacatctgctttcctaaatttaactatagcctttacattatctctactaggtacttttatatttcgctcccacttaatatctactctcctctgcctagaaggaataatactatcactatttgtcataacttcaacatccacattaaactccaactccataatctccataaccatcccaattaccattctagtttttgcagcctgcgaagtagcagtaggtttagccttactagtaaaaatttcaaatacccacggaacagactacgtacaaaacctcaaccttctacaatgttaaaaatcattttcccatctatcatactcctcccactaacatgactctcagccaacaaaaaaatctgaaccaatgtcacctcctacagctttctagtgagcctattaagcttatcactcctatgacaaaatgacgaaaattacctaaatttctcagttatattctcctccgatccattatccaccccactaatcattctaacaacttgactcctcccactaataatgctcgctagccaaaatcacataaaaaaagaaaatataatgcatcaaaaactttacatctcaatacttattagcctccaaattttactcatcataacattctccgcaacagaactaattttattttatatcctgttcgaagccactctaatcccaacactaattatcattacacgatgaggcaaccaaacagaacgcttaaatgcaggaatttatttcctgttttatacactaattggctccatcccactcttaattgccctcatttcaatccaaaactcaataggaacactcaacttcctaatcctctccctcacaacacaccccctaccctcaacatgatccaacaccattctatgactagcatgtataatagcatttataatcaaaataccattatacggagtccatctatgattaccaaaagcccacgtagaagctccaattgcaggctctataattttagcagcaattctcctaaagctagggggttatgggataatacgagtttccatcattctagaccccctaacaaaatctttagcctacccattcatcatcctctcattatgaggcataattataactagctcggtctgcctacgccaaacagatctaaaatcattaattgcttactcatcagtaagccatatagccctagtcatcacagccattataatccagacaccatgaagcttcatgggagctacaatactaataatcgcccacggcttaacctcatcactcttattctgcctagcaaacaccaactacgaacgaattcacagccgaactataattatagctcgaggattacaaataatcttttcattgatagcaacatgatgattattagcaagcttagccaacctagcactaccacccctaattaacctcataggcgagttattcattgttatagcaacattttcctgatcgaacccctctatcatccttatagcaactaacattgtcactacaggaatatactcaatatatatgattatcacaacccaacgaggaaaactaaccagccacataaacaacctccaaccttcccacacacgagaattaacactcatagctctacacattattcccctcatactattaacaatcaaccctaaactcatcacaggcctaacaatatgtagatatagtttacaaaaaacattagactgtgaatctaacaacaggaaatcaaattccttatttaccaagaaagtatgcaagaactgctaattcatgcacccatacctaaaacatatggctttcttacttttataggatagaagtaatccattggtcttaggaaccaaaaaccttggtgcaactccaaataaaagtaata

SEQ ID NO: 2 - DNA, 1912 bp, Rattus norvegicus
  Genbank Accession No. J01436
ccggtactcctcagtagccatagcagttgtatacccaaatacaaccaacatcccacccaaataaattaaaaatactattaaacctaaaaacgaacccccaaaccctaaaactattaagcacccaatacatccactaacaatcaatccaaacccaccataaataggtgaaggcttcaacgccaaccctagacaaccagtcaaaaacagtaaacttaaaataaacatataatttgtcattatttctacacagcatttaactgtgactaatgacatgaaaaatcatcgttgtaattcaactatagaaacacctaatgacaaatatccgaaaatctcaccccctattcaaaatcatcaaccactcctttatcgacctccccgccccatctaacatctcatcatgatgaaacttcggttctctactaggagtatgcctcatagtacaaatcctcacaggcttattcctagcaatacactacacgtctgataccataacagcattctcatcagtcacccacatctgccgagacgtaaactacggctgactaatccgatacctacacgccaacggcgcctcaatatttttcatctgcctattcctccatgtgggacgaggactatactatggatcctacactttcctagaaacctgaaacattgggatcatcctactatttgcagtcatagcaactgcattcatgggctatgtactcccatgaggacaaatatcattctgaggagctacagtaattacaaacctattatcagctaccccttacattgggactaccctagtcgaatgaatctgaggaggcttctcagtagacaaagcaaccctaacacgcttcttcgcattccacttcatcctcccattcattatcgccgcccttgcaattgtacatcttcttttcctccacgaaacaggatcaaataaccccacaggattaaactccgacgcagacaaaatcccattccatccatattatacaattaaagacctcctaggtgtatttatattactattattcctaataaccctagtactattcttcccagacctactaggagacccagacaattatacacccgctaaccccctcaacaccccaccccacatcaaaccagaatgatattttctctttgcctacgctattctacgctccattcccaacaaactaggaggggtcgtagccctaatcttatcaatcctaatcttagccttcctaccattcctgcatacctcaaaacaacgcagcttaacattccgcccaatcacccaaatcctttactgaatcctagtagccaacctcctagtcttaacatgaatcggaggccaaccagtagaacacccatttatcattattggtcaactagcctccatcagctatttttcaattatcctcattctcataccaatctctggaattgttgaagacaaaatgttaaaatgaaattaatgtcccgatagtataaaaattactctggtcttgtaaaccaaaaatgaagagtcagtcttctcaggacaatcaagaagaaggaactacctccccaccatcaacacccaaagctgatattctacttaaactacttcttgtcagtacataaaatgatatggacattaaaaaacatttatgtatatcgtacattaaattattttcccaagcatataagcatgtaatatatatctaatgatttaggacatagatttaaactcaactataaattcacaacaacatgtctattctcaaatacattagataatgtctattagacatatctgtgttattagacatgcaccattaagtcataaacctttctcttccatatgactatccctgtccccaattggtctctatttctaccatcctccgtgaaatcaacaacccgcccactcgtccccctcttctcgctccgg

SEQ ID NO: 3 - DNA, 946 bp, Rattus norvegicus
  Genbank Accession No. M35826
attaatatcctaacactcctaatcccaatcttaattgccataggccttctcaccctagtagaacggaaaatcctaggctacatacaattacgcaaaggccccaacaacgaaggcccatatggtaaactacaaccatttgcagatgccataaaactattcataaaagaacccatacgccctctaaccacctcaatatcactatttattatcgccccaaccctctcccttacactagctctaagcctatgaattcccttaccaataccccacccccttatcaacctcaacctaggcataccatttattctagccacatccagcctttcggtctactccattctatgatcgggatgagcctcaaattcaaaatactccctattcggagccctacgagccgttgcccaaaccatctcttacgaagtcacaatagccttatacctcttatccgtcctcctaataagcggctccttctccctacaaatacttatcactacacaagaacatatctgactattaatccccgcctgaccaatagccataatatgatacatttcaaccctcgcagaaacaaatcgagctcccttcgacttaacagaaggagaatcagaattagtctcaggctttaacgtcgaatacgccgcaggaccattcgccctattcttcatagccgagtacaccaacattattctaataaacgccctaacatcaattgtattcctaggccccttatatcatatcaattaccctgaattatactcaaccagcttcataacagaaacactacttctatccacaactttcctatgaattcgagcatcctacccccgttttcgatatgaccaactaatgcacctcctatgaaaaaatttcctcccactaacactagcattctgcatatgatacatttccctgccaattttcctagcaggaattccaccctacacat

SEQ ID NO: 4 - DNA, 551 bp, Rattus norvegicus
  Genbank Accession No. AA850885
acttttacgcctgtaggaattgcgataattatagtggcagatgtaaagtaggctcgggtgtctacatctaggcctactgtgaatatgtgatgtgctcatacaataaatcctaggaagccaatagatattatggctcataccatacctatatatccgaagggttctttttttccagagtaataggtaactacatgtgaaataattccaaaccctggaagaattaagatgtacacttctgggtggccgaagaatcagaataggtgttgataaagaattgggtctccacctccagcggggtcgaagaaagtagtatttagatttcggtctgtaaggagtatagtgatacctgctgctaatactggcagtgagagaagtagtaggacggctgtaattagtacggatcatacaaagagaggtgtctgatattgggttatagcagggggttttatattaatgatagtggtgataaagttgatagctcctaagatagaagacaccccggctaggtggagggaaaaaatagttaaatctacggatgccccagcatgggc

SEQ ID NO: 5 - DNA, 450 bp, Rattus norvegicus
  Genbank Accession No. AA875531
tctttttttttttttttctttttggaaaaccaaacatgctttattttattcttcacaatttatttaaacatctcacaggacacaataggtacaattcaattttttttctgcttgtccaagaaacaggacttcttcggaaccacggggaggaacgaaaatgaggctggcaaagaaacgaatgctgaatctagagaggagagaatctggggcaagtgttcttcattcctttagttggggataaggtgaacgagagggccgctaagtcaaattaagaatcccactcactgcacatcactatggaggatcgagtcttctgtaattcttctagctccatccacattctcctagtaggtctgggaagaatagtactagggttattaggaataatagtaatataaatacacctaggaggtctttaattgtataatatggatggaatgggattttgtc

SEQ ID NO: 6 - DNA, 587 bp, Rattus norvegicus
  Genbank Accession No. AA892248
agggtttgctgaaaatggcggtatataggctgaattatcgagaaggggtaaggtagaacggggtttatcgattatagaacaggctcctctaaatggatataaagtaccgccaagtcctttgagttttaagctgtagctagtagttctctggcaaataattttgtaggtttaattattaaggtttagggctaagcatagtggggtatctaatcccagtttgggtcttagctatcgtgcattatataaatgattagaattactttcgttattgggcttaagtcctaacaatgaattttcacatataacttggattttaattctattatgacatttatagttggcacgttttacgccgaaaataattagtttgggttaatcgtatgaccgcggtggctggcacgaaatttaccaaccctgacaggtatagcttagtcaaactttcgttcagtgcctaatatttatcactgctgagtcccgtgggggtgtggctaagcaaggcgtcttgagctatattatgtgcttgatgccctctccttaagttttacgcaaatgtttaagggattttacaccggtttatggatgtttgc

SEQ ID NO: 7 - DNA, 720 bp, Rattus norvegicus
  Genbank Accession No. AA945152
aggatcctcatcaatagatagaaacgtataggaatagtcaaactacatctacgaagtgtcagtatcatgctgcggcttcaaatccgaaatgatgttttgatgtgaagtggaattttagttgtcgtagtagacagacaattaggaaagttgagccaataattacgtggaggccatgaaatcccgttgctatgaagaatgttgagccgtaaattccgtctgagatagaaaatgatgtttcgaaatactctgaggcttgtaagatcgtgaaatataatcctaagagaatggtgattagtagggcttggtttatatggtttcggttgccttctattaggctgtgatgggctcatgtaattgagactcctgatgctaagaggactgatgtatttagaaggggtacttctaggggatttaaaggggtaattcctgttgggggtcagcaaccgcctaggtcgtgggtaggaactaggctggaatgataaaatgctcagaaaaatccggcaaagaagaatacttcggagacaataaacaggattattccgtatcggaggcctttttgtacaataggggtgtggtggccttggtatgttccttcacggatgatatctcgtcatcattgatatatagttaggatgtttgtcaggaggcctaatgataggagaattgtggagttgtaatggaatcatattactaagccggatgtgagtagaagagctgata

SEQ ID NO: 8 - DNA, 443 bp, Rattus norvegicus
  Genbank Accession No. AI103396
attaatttcattttaacattttgtcttcaacaattccagagattggtatgagaatgaggataattgaaaagtagctgatggaggctagttggccaataatgataaatgggtgttctactggttggcctccgattcatgttaagactaggaggttggctactaggattcagtaaaggatttgggtgattgggcggaatgttaagctgcgttgttttgaagtatgcaggaatggtaggaaggctaagattaggattgataagattagggctacgactcctcctagtttgttgggaatggagcgtagaatagcggccgcaaaggtccttgtcctttttatcactttttaaaaacccgtgagatgggatcaacattgaaagtggggatttttttttctaaagcaatcattacatgagaaataaatttatataacccctcctcgtgcc

SEQ ID NO: 9 - DNA, 538 bp, Rattus norvegicus
  Genbank Accession No. AI171355
tttttttttttgcgaagaagcgtgttagggtttctttgtcttctgagaagcctcctcagattcattcgactagggtagtcccaatgtaagggatagctgataataggtttgtaattactgtagctcctcagaatgatatttgtcctcatgggagtacatagcccatgaatgcagttgctatgactgcaaatagtaggatgatcccaatgtttcaggtttctaggaaagtgtaggatccatagtatagtcctcgtcccacatggaggaataggcagatgaaaaatattgaggcgccgttggcgtgtaggtatcggattagtcagccgtagtttacgtctcggcagatgtgggtgactgatgagaatgctgttatggtatcagacgtgtagtgtattgctaggaataagcctgtgaggatttgtactatgaggcatactcctagtagagaaccgaagtttcatcatgatgagatgttagatggggcggggaggtcgataaaagagtggttgatgattttgaatagggggtgcctcgtgcc

SEQ ID NO: 10 - DNA, 513 bp, Rattus norvegicus
  Genbank Accession No. AI179150
attaatttcattttaacattttgtcttcaacaattccagagattggtatgagaatgaggataattgaaaagtagctgatggaggctagttggccaataatgataaatgggtgttctactggttggcctccgattcatgttaagactaggaggttggctactaggattcagtaaaggatttgggtgattgggcggaatgttaagctgcgttgttttgaagtatgcaggaatggtaggaaggctaagattaggattgataagattagggctacgactcctcctagtttgttgggaatggagcgtagaatagcgtaggcaaagagaaaatatcattctggtttgatgtggggtggggtgttgagggggttagcgggtgtataattgtctgggtctcctagtaagtctgggaagaatagtactagggttattatgaataatagtaatataaatacacctaggaagtctttaattgtataatatggatggaatgggattttgtctgcgttggagttta

SEQ ID NO: 11 - DNA, 16300 bp, Rattus norvegicus
  Genbank Accession No. X14848
gttaatgtagcttataataaagcaaagcactgaaaatgcttagatggattcaaaaatcccataaacacaaaggtttggtcctggccttataattaattggaggtaagattacacatgcaaacatccataaaccggtgtaaaatcccttaaagatttgcctaaaacttaaggagagggcatcaagcacataatatagctcaagacgccttgcctagccacacccccacgggactcagcagtgataaatattaagcaatgaacgaaagtttgactaagctagtacctctcagggttggtaaatttcgtgccagccaccgcggtcatacgattaacccaaactaattattttcggcgtaaaacgtgccaactataaatctcataatagaattaaaatccaacttatatgtgaaaattcattgttaggacctaagcccaataacgaaagtaattctaatcatttatataatgcacgatagctaagacccaaactgggattagataccccactatgcttagccctaaaccttaataattaaacctacaaaattatttgccagagaactactagctacagcttaaaactcaaaggacttggcggtactttatatccatctagaggagcctgttctataatcgataaaccccgttctaccttaccccttctcgctaattcagcctatataccgccatcttcagcaaaccctaaaaaggcactaaagtaagcacaagaacaaacataaaaacgttaggtcaaggtgtagccaatgaagcggaaagaaatgggctacattttcttttcccagagaacattacgaaacctttatgaaactaaaggacaaaggaggatttagtagtaaattaagaatagagagcttaattgaatagagcaatgaagtacgcacacaccgcccgtcaccctcctcaaattagattgacattcacatatacataatttcactaacaaatttatgagaggagataagtcgtaacaaggtaagcatactggaaagtgtgcttggaataatcacagtgtagcttaatcacaaagcatctggcctacacccagaagaattcataaaaaatgaacactttgaactaaccctagccctacaaccaaccaacataactaaacccccacataaactaaaacatttaactcaaaaagtattggagaaagaaatttacttaccaagagctatagagaaagtaccgcaagggaaatgatgaaagactaatttaaagtaaaaacaagacaaagattaaacctgtaccttttgcataatgaattaactagaaaatccttaacaaaaagaatttaagctaagaaccccgaaaccaaacgagctacctaaaaacaatttcatgaatcaacccgtctatgtagcaaaatagtgggaagatttttaggtagaggtgaaaagcctatcgagcttggtgatagctggttgcccaaaaaagaatttcagttcaaactttaagcttccatcagaacaacaaatcaaaatgtaaacttaaaatatagccaaaagagggacagctctttaggaaacggaaaaaaccttaaatagtgaataaacaactacaatcacttaaccattgtaggcttaaaagcaagccatcaataaagaaagcgtcaagccacatcatcttacacacacactaattccacaaacctcaaaaattccaaaattacaaattgggctaaatctatgatcctagtgaatactgttaatatgtgaacaagaaccaatccaccaagcacaagtgctaagacaaccggataaccattgttaattattgaatcataggcataacccaacaatagaattacctatccctaactcgttagcccaacacaggcgtgctttaaggaaagtttaaaaaagtaaaggaactcggcaaacacgaaccccgcctgtttaccaaaaacatctcctctagcataacaagtattagtggcatcgcctgcccagtgactaaagttccacggccgcggtatcccgaccgtgcaaaggtaggataatcacttgttccttaattagggactagaatgaatggctaaacgagggtccaaccgtctcttacttgcaatcagtgaaattgaccttccagtgaaggggcggactcataataaaagacgagaagaccctatggagctttaatttactaatttcaatttatataaaaaaacctaatgggcgaaaacaacaaaattatgaactaccaaatttcggttggggtgacctcggagaataaaaaatcctccgaatgattataaccgagtcggtaaccgtgtccgacccagtcaagtaatactaatatcttattgacccaattattgatcaacggaccaagttaccctagggtaacagcgcgacctatttaagagttcatatcgacaattagggtttacgacctcgatgttggatcaggacatcccaatggtgcagaagctattaatggttcgtttgttcaacgattaaagtcctacgtgatctaagtccggcaatccaggtcggtttctatctatttacaatttctcccagttacgaaaggacaagagaaatggagaccaaccaatcctaggcttccaaccaatttagaaaaacttaataaagtatatatgtacaataaataaccttagacccaagttattagggtggcagagccaagtaattgcgtaagacttaaaaccttgttcccagaggttcaaatcctctccctaatagtgtactttattaatatcctaacactcctaatcccaatcttaattgccataggccttctcaccctagtagaacggaaaatcctaggctacatacaattacgcaaaggccccaacaacgaaggcccatatggtaaactacaaccatttgcagatgccataaaactattcataaaagaacccatacgccctctaaccacctcaatatcactatttattatcgccccaaccctctcccttacactagctctaagcctatgaattcccttaccaataccccacccccttatcaacctcaacctaggcataccatttattctagccacatccagcctttcggtctactccattctatgatcgggatgagcctcaaattcaaaatactccctattcggagccctacgagccgttgcccaaaccatctcttacgaagtcacaatagccttatacctcttatccgtcctcctaataagcggctccttctccctacaaatacttatcactacacaagaacatatctgactattaatccccgcctgaccaatagccataatatgatacatttcaaccctcgcagaaacaaatcgagctcccttcgacttaacagaaggagaatcagaattagtctcaggctttaacgtcgaatacgccgcaggaccattcgccctattcttcatagccgagtacaccaacattattctaataaacgccctaacatcaattgtattcctaggccccttatatcatatcaattaccctgaattatactcaaccagcttcataacagaaacactacttctatccacaactttcctatggattcgagcatcctacccccgttttcgatatgaccaactaatgcacctcctatgaaaaaatttcctcccactaacactagcattctgcatatgatacatttccctgccaattttcctagcaggaattccaccctacacatagaaatatgtctgacaaaagagttactttgatagagtaaataatagaggtttaaatcctcttatttctaggacaataggaattgaacctacacctaagaattcaaaattctccgtgccaccaatacaccctatcctacatagtaaggtcagctaactaagctatcgggcccataccccgaaaatgttggttaaacccttcccgtactaataaatccaattaccctaaccattatttacttaaccacctttaaaggccgcctaatcacgacacttagcaccaacttaccaccaatatgagtaggattggaaataagccttttagctatcatcccacttctagccaacaaaaaaagcccacgatcaactgaagcagcaacaaaatattttctaacccaagctacagcctcaataattatcctactagtcatcatcctcaactacaaacaatcaggaatatgaacccttcaacaacaaaccaataacatactactcaacataatactcatttcactggccataaaacttggactagccccattccactactgactacccgaagtcacccaaggaattcccctacacattggattaatcttactaacatgacaaaaaattgctccactatcaattctataccaattttatcaactcctaaacccaactatcaccaccattctcgcaatttcatcagtctttgttggcgcctgaggaggacttaaccagacccaaacacgaaaaatcatagcatactcatcaattgcccacataggatgaataacagcaatccttccatacaaccctaacttaaccctcctaaacttaacaatttacatcctacttactgttccaatattcaattacatcataacaaactcagcaacaacaatcaacacactctcactcgcatgaaataaaactcccataatcctaaccatagcatccatcatcctcctatcactaggaggactcccccctctcacaggatttttaccaaaatgagcaattatctccgagcttctaaaaaacaactgctcaaccctatcaacactaatagctatcatagccctattaagcctattcttctatactcgactaatttactctatatccctcaccacattcccaaccaacaacaactccaaaataatctcccaccaccaaaacccaaaacataattttatcctcccaaccctcacagtattaagtaccctaaccctaccgctttcctcccaactaatcacatagaagtttaggatatacagttcaagagccttcaaagcccttagaaaacaaacaagtttaacttctgataaggactgtaagactatatcttacatctgttaaatgcaaatcaactgctttaattaagctaaatcctcaactagattggaaggaatcaaattcctacgaaaatttagttaacagctaaataccctacttactggcttcaatctacttctcccgcctatcagaaaagaggcgggagaagccttagtagaggagattctctacaccttcgaacttgcaattcgacatgataatcaccttaaggctttttggtaaaaagggggctcaacccctgtctttagatttacagtctaatgcttactcagccattttacctatgttcgtaaaccgttgactcttttcaactaaccacaaagatatcggaaccctctacctattatttggagcctgagcaggaatagtagggacagctttgagtattctaattcgagctgaactaggacagccaggcgcactcctaggagatgaccaaatctataatgtcatcgtcacagcccatgcattcgtaataattttctttatagtaatacctataataattggaggcttcggaaactgacttgtaccactaataattggagcccctgatatagcattcccacgaataaataacataagcttttgactgcttcctccatcatttctactccttttagcatcctccatagtagaagctggagctggaacaggatgaacagtatatccccccttagccggaaacctagcccatgctggggtatccgtagatttaactattttttccctccacctagccggggtgtcttctatcttaggagctatcaactttatcaccactatcattaatataaaaccccctgctataacccaatatcagacacctctctttgtatgatccgtactaattacagccgtcctactacttctctcactgccagtattagcagcaggtatcactatactccttacagaccgaaatctaaatactactttcttcgaccccgctggaggtggagacccaattctttatcaacacctattctgattcttcggccacccagaagtgtacatcttaattcttccagggtttggaattatttcacatgtagttacctattactctggaaaaaaagaacccttcggatatataggtatggtatgaaccataatatctattggcttcctaggatttattgtatgagcacatcacatattcacagtaggcctagatgtagacacccgagcctactttacatctgccactataattatcgcaattcctacaggcgtaaaagtattcagctgactcgctacactacatggaggaaatatcaaatgatcccccgccatattatgagccttagggtttatcttcttattcacagtagggggcctaacagggatcgtactatctaactcatcccttgacattgtacttcatgatacatactacgtagtagctcacttccactatgtcttatctataggagcagtattcgccatcatagctggcttcgtccactgattcccactattctcaggctataccctaaatgacacatgagcaaaagcccactttgccattatatttgtaggtgtaaacataacattttttcctcaacacttcctaggattagcagggatacctcgtcgttactctgattatccagatgcttataccacatgaaatacagtctcctctataggctcattcatctcacttacggccgtccttgtaatgatcttcatgatttgagaagccttcgcatcaaaacgagaagtgctctcaatttcctactcttcaactaacctagaatgactgcatggatgccccccaccttaccacacattcgaagaaccttcctatgtaaaagttaaataagaaaggaaggaatcgaccccctacaactggtttcaagccaatttcataaccattatgtctttctcaatgagatattagtaaaataattacataaccttgtcaaggttaagttatagacctaatcctatatatcttacatggcttacccatttcaacttggcttacaagacgctacatcacctatcatagaagaacttacaaactttcatgaccacaccctaataattgtattcctcatcagctccctagtactttatattatttcactaatactaacaacaaaactaacacacacaagcacaatagacgcccaagaagtagaaacaatttgaacaattctcccagctgtcattcttattctaattgcccttccctccctacgaattctatacataatagacgagattaataacccagttctaacagtaaaaactataggacaccaatgatactgaagctatgaatatactgactatgaagacctatgctttgactcctacataatcccaaccaatgacctaaaaccaggtgaacttcgtctattagaagttgataatcgggtagtcttaccaatagaacttccaattcgtatactaatctcatccgaagacgtcctgcactcatgagccatcccttcactagggttaaaaaccgacgcaatccccggccgcctaaaccaagctacagtcacatcaaaccgaccaggtctattctatggccaatgctctgaaatttgcggctcaaatcacagcttcatacccattgtactagaaatagtgcctctaaaatatttcgaaaactgatcagcttctataatttaaactcattgcgaagcttagagcgttaaccttttaagttaaagttagagacaacaaatctccacaatgacatgccacaactagacacatccacatgatttattacaatcatctcctcaatagccacactatttattttatttcaattaaaaatttcttcccaaacctttcctgcacctccctcacccaaaactatagccacagaaaaaacgaataacccttgagaatcaaaatgaacgaaaatctatttgcctctttcattacccccacaataataggtctaccaattgttgtgaccattattatgttcccatcaattctattcccatcatcagaacgcctaatcagcaaccgactacactcatttcaacactgactaatcaaacttatcatcaaacaaataatgttaattcacacaccaaaaggacgaacctgagccctaataattgtatccctaattatatttattggctcaaccaaccttctagggcttcttccccatacatttacccctaccactcagctatctatagacctaagcatagccatccccctatgagcaggagccgtaattctaggtttccgacacaaactaaaaaattctttagcccacttctcaccgcaaggaacccccatctcactaattcccatactaatcatcatcgaaactatcagcctatttattcaaccgatagcactagcagtacgactaacagcaaacattacagcaggccatctattaatgcatctaatcggaggagctaccctagtacttatagacatcagcccaccaaccgctacaattacatttattattctacttctacttacagtacttgaatttgccgtagccttaattcaagcctatgtattcacccttctagtcagcctgtacctacatgataacacataatgacccaccaaacccatgcataccatatagtaaacccaagcccatgaccactaacaggagccctatcagctcttctactcacatccggcttagtaatatgattccattacaactccacaattctcctatcattaggcctcctgacaaacatcctaactatatatcaatgatgacgagatatcatccgtgaaggaacataccaaggccaccacacccctattgtacaaaaaggcctccgatacggaataatcctgtttattgtctccgaagtattcttctttgccggatttttctgagcattttatcattccagcctagttcctacccacgacctaggcggttgctgacccccaacaggaatcacccctttaaatcccctagaagtaccccttctaaatacatcagtcctcttagcatcaggagtctcaattacatgagcccatcacagcctaatagaaggcaaccgaaaccatataaaccaagccctactaatcaccattctcttaggattatatttcactatcttacaagcctcagagtatttcgaaacatcattttctatctcagacggaatttacggctcaacattcttcatagcaacgggatttcatggcctccacgtaattattggctcaactttcctaattgtctgtctactacgacaactaaaattccacttcacatcaaaacatcatttcggatttgaagccgcagcatgatactgacacttcgtagatgtagtttgactattcctatacgtttctatctattgatgaggatcctactcccttagtataaacaatacaactgacttccaatcagttaattctgaaaaaactcagaagagagtaattaacctacccattatcatcacaattaacatcaccttatcctttatcctcatttcaattgcattctgattgcctcaaataaacttatactccgaaaaagcaaacccatatgaatgtggcttcgacccaacaagttctgcacgccttcctttttcaataaaatttttcttagtagccattacatttctactattcgacctagaaatcgccttactacttcccctcccatgagcgattcaaacaaccaataccactacaataatagcaactgcctttattttagtcactattttgtctcttggcctagcctacgaatgaacacaaaaaggactagaatgaacagaataattggtaattagtttaaataaaattaatgatttcgactcattagattatgataataatcataattaccaacaatgacatctgctttcctaaatttaactatagcctttacattatctctactaggtacttttatatttcgctcccacctaatatccactctcctctgcctagaaggaataatactatcactatttgtcataacttcaacatccacattaaactccaactccataatctccataaccatcccaattaccattctagtttttgcagcctgcgaagcagcagtaggtttagccttactagtaaaaatttcaaatacttacggaacagactacgtacaaaacctcaaccttctacaatgttaaaaattattttcccatctatcatactcctcccactaacatgactctcagccaacaaaaaaatctgaaccaatgtcacctcctacagctttctagtgagcctattaagcttatcactcctatgacaaaatgacgaaaattacctaaatttctcagttatattctcctccgatccattatccaccccactaatcattctaacaacttgactcctcccactaataatgctcgctagccaaaatcacataaaaaaagaaaatataatgcatcaaaaactttacatctcaatacttattagcctccaaattttactcatcataacattctccgcaacagaactaattttattttatatcctgttcgaggccactctaatcccaacactaattatcattacacgatgaggcaaccaaacagaacgcttaaatgcaggaatttatttcctgttttatacactaattggctccatcccactcttaattgccctcatttcaatccaaaactcaataggaacactcaacttcctaatcctttccctcacaacacaccccctaccctcaacatgatccaacaccattctatgactagcatgtataatagcatttataatcaaaataccattatacggagtccatctatgattaccaaaagcccacgtagaagctccaattgcaggctctataattttagcagcaattctcctaaagctagggggttatgggataatacgagtttccatcattctagaccccctaacaaaatctttagcctacccattcatcatcctctcattatgaggcataattataactagctcaatctgcctacgccaaacagatctaaaatcattaattgcttactcatcagtaagccatatagccctagtcatcacagccattataatccagacaccatgaagcttcatgggagccacaatactaataatcgcccacggcttaacctcatcactcttattctgcctagcaaacaccaactacgaacgaattcacagccgaactataattatagctcgaggattacaaataatctttccattgatagcaacatgatgactattagcaagcttagccaacctagcactaccacccctaattaacctcataggcgagttattcattgttatagcaacattttcctgatcgaacccctctatcatccttatagcaactaacattgtcatcacaggaatatactcaatatatatgattatcacaacccaacgaggaaaactaaccagccacataaacaacctccaaccttcccacacacgagaattaacactcatagctctacacattattcccctcatactattaacaatcaaccctaaactcatcacaggcctaacaatatgtagatatagtttacaaaaaacattagactgtgaatctaacaacaggaaatcaaattccttatttaccaagaaagtatgcaagaactgctaattcatgcacccatacctaaaacatatggctttcttacttttataggatagaagtaatccattggtcttaggaaccaaaaaccttggtgcaactccaaataaaagtaataaatataataacaatcctaatcctcataattcttgatttacttacaacaccaatcacattttcaataacaatcttaaccaaacttatgtacttccgtcatatgctcattacatcaattaaattctcattcctccttagcctcttacctttactactattcttccaccacaacacagaatacataattactaactgacattgactaactattaattctattaaacttactataagtttcaaaattgactatttctcaatcctattcctatcagtatccctattcgtaacatgatcaattatacaattctcttcatgatatatacactctgacccccacattaaccgattcattaagtacttaataatattcctgaataacatactaatcctaacctcagctaacaatctattccaactctttattggatgagaaggggtaggaattatatccttcttattaatcggatgatgatatggccttgcagacgccaacacagcggccctccaagcaatcctctacaaccgagtcggagacattggtttcatcctagctataacctgattctgcctaaacataaactcctgagaactccaacaaattttcttaaccaacaccaacaacaatctagtccctctcacaggactactaattgcagccacaggaaaatccgcccaattcggacttcatccatgactcccatcagctatagaaggcccaactcccgtctctgccctactacactcaagcacaatagttgtagcagggatcttcctaataatccgattccaccccctaacctcaaacaatagtactattataacagccatactatgtcttggtgcaatcaccacattattcacagcaatctgtgctctcacccaaaacgacatcaaaaaaatcgtagctttctcaacatccagccaactaggccttataatagtcacattagggattaaccaaccctaccttgctttcctccacatttgcacccatgcattcttcaaagccatattattcatatgctccggatcaatcatccatatcctcaacgatgaacaagacattcgaaaaataggcaatataataaaagcaataccattcacatcatcttgtctcattatcggaagcctagcccttaccggaatacctttcctcacaggattctattcaaaagatctcatcatcgaagccatcaacacgtgtaacaccaacgcctgagccctaataatcactttaatcgccacatccataactgctgtgtacagcatacggatcatctacttcgtcaccatgacaaaaccacgatactccccactaattactattaatgaaaacaacccaaacctcattaatccaatcaaacgcctagcattaggaagcatcctagcaggcttccttatctcactaaatattcctccaactaacattcaaattctcacaataccctgacatttaaaaataacagccctacttattacaatcctaggatttgccattgccctagaacttaacaatttaacactaaatctatcaataagcaaacccaccaaactatcatcattctcaacctccctaggctactacccaccaattataccccgaattattcctcaaaaaactctaaattctagctacaaattatccttaaacctactagacctaatctgatcagaaaagacaatcccaaaatcaacctcaatcacccaaacccaactatctaaaataatatccaaccaaaaaggactaatcaaactatatttcctatcatttctcatcactatttcactaatttttatcttacacacacttaatcccgagtgatttcaataataataaaaatccccgcaaacaatgaccacccagccaccactatcattcaagtagcacaactataaatagccgcaaccccaatccccccctccaacataaccccaacatcatcaatctcatacattaatcaatcgcctagactatcaaaatcaactaactccaccttattattcaaactaaacaagtagaacactaccaactccataaaaagccctaaaacaaaaaaactaaaaataaaccaattagaccctcaagtttccggatattcctcagtagccatagcagttgtatacccaaatacaaccaacatcccacccaaataaattaaaaatactattaaacctaaaaacgaacccccaaaccctaaaactattaagcacccaatacatccactaacaatcaatccaaacccaccataaataggtgaaggcttcaacgccaaccctagacaaccagtcaaaaacagtaaacttaaaataaacatataatttgtcattatttctacacagcatttaactgtgactaatgacatgaaaaatcatcgttgtaattcaactatagaaacatctaatgacaaacatccgaaaatctcaccccctattcaaaatcatcaaccactcctttatcgacctaccggccccatctaacatctcatcatgatgaaacttcggttctctactaggagtatgcctcatagtacaaatcctcacaggcttattcctagcaatacactacacgtctgataccataacagcattctcatcagtcacccacatctgccgagacgtaaactacggctgactaatccgatacctacaagccaacggcgcctcaatatttttcatctgcctattcctccatgtgggacgaggactatactatggatcctacactttcctagaaacctgaaacattgggatcatcctactatttgcagtcatagcaactgcattcatgggctatgtactcccatgaggacaaatatcattctgaggagctacagtaattacaaacctattatcagctatcccttacattgggactaccctagtcgaatgaatctgaggaggcttctcagtagacaaagcaaccctaacacgcttcttcgcattccacttcatcctcccattcattatcgccgcccttgcaattgtacatcttcttttcctccacgaaacaggatcaaataaccccacaggattaaactccgacgcagacaaaatcccattccatccatattatacaattaaagacctcctaggtgtatttatattactattattcctaataaccctagtactattcttcccagacctactaggagacccagacaattatacacccgctaaccccctcaacaccccaccccacatcaaaccagaatgatactttctctttgcctacgctattctacgctccattcccaacaaactaggaggggtcgtagccctaatcttatcaatcctaatcttagccttcctaccattcctgcatacctcaaaacaacgcagcttaacattccgcccaatcacccaaatcctttactgaatcctagtagccaacctcctagtcttaacatgaatcggaggccaaccagtagaacacccatttatcattattggtcaactagcctccatcagttatttttcaattatcctcattctcataccaatctctggaattgttgaagacaaaatgttaaaatgaaattaatgtcccgatagtataaaaattactctggtcttgtaaaccaaaaatgaagagtcagtcttctcaggacaatcaagaagaaggaactacctccccaccatcaacacccaaagctgatattctacttaaactacttcttgtcagtacataaaatgatatggacattaaaacatttatgtatatcgtacattaaattattttccccaagcatataagcatgtaatatatatctaatgatttaggacatacatttaaactcaactataaattcacaacaacatgtctattctcaaatacattaagataatgcttattagacatatctgtgttattagacatgcaccattaagtcataaacctttctcttccatatgactatccctgtccccaattggtctctatttctaccatcctccgtgaaatcaacaacccgcccactcgtccccctcttctcgctccgggcccattcgtcctgggggtgactatactgaaactttaccaggcatctggttcttacttcagggccatcaattggttcatcgtccatacgttccccttaaataagacatctcgatggtaacgggtctaatcagcccatgatcaacataactgtggtgatatacatttggtattttttaattttcggatgccttcctcaacatagccgtcaaggcatgaaggtcagcacaaagtcctgtggaaccttttagttaagggtcatttatcctcatagacaaagctcgaaagactattttattcatgtttgtaagacataaatatttataaatactgaaaaatctgtcaacaaacccccccaccccctacacctgaaacttcaatgccaaaccccaaaaacattaaagcaagaattaaataaaacaaaaagctacttaattcttaaaaggcttctccattctagtagaccacaaaattttaacttaaatcttagcattggtaaaatttcccgacacaaaatctttcctcctaactaaaccctctttacttgcctaccctcagaaaattccacatacaccaaa

SEQ ID NO: 12 - DNA, 1339 bp, Rattus norvegicus
  Genbank Accession No. NM_012498
gcactcttgcgggtcgttgtgcgtaacttgcagcaatcatggctagccatctggaactcaacaacggcaccaagatgcccaccctgggtctgggcacctggaagtctcctcctggccaggtgaccgaggctgtgaaggttgctatcgacatggggtatcgccacattgactgcgcccaggtgtaccagaatgagaaggaggtgggggtggccctccaggagaagctcaaggagcaggtggtgaagcgccaggatctcttcattgtcagcaagctgtggtgcacgttccacgaccagagcatggtgaaaggggcctgccagaagacgctgagcgacctgcagctggactacctggacctctaccttattcactggccaactggcttcaagcctgggcctgactatttccccctggatgcatcgggaaacgtgattcctagtgacaccgattttgtggacacttggacggctatggagcaactagtggatgaaggtttggtaaaagcaatcggagtctccaacttcaaccctcttcagattgagaggatcttgaacaaacctggcttaaagtataagcctgctgttaaccagatcgagtgccacccatacctaactcaggagaagctgattgagtactgccattgcaaaggcatcgtggtgactgcatacagtccccttggttctcctgacaggccctgggccaagcctgaggacccctctctcctggaggatcccaggatcaaggaaattgcagccaagtacaataaaactacagcccaggtgctgatccggttccccatccaaaggaacctggtcgtgatccccaagtctgtgacaccagcacgtattgctgagaactttaaggtctttgactttgagctgagcaatgaggacatggccactctactcagctacaacaggaactggagggtgtgcgccttgatgagctgtgccaaacacaaggattaccccttccacgcagaagtctgaagctgtggtggacgaatcctgctcctccccaagcgacttaacacatgttctttctgcctcatctgcccttgcaagtgtccctctgcactgggtggcaccttgcagaccagatggtgagagtttgttagtttgacgtagaatgtggagggcagtaccagtagctgaggagtttcttcggcctttcttggtcttcttcccacctggaggactttaacacgagtaccttttccaaccaaagagaaagcaagatttatagcccaagtcatgccactaacacttaaatttgagtgcttagaactccagtcctatgggggtcagactttttgcctcaaataaaaactgcttttgtg

SEQ ID NO: 13 - DNA, 1442 bp, Rattus norvegicus
  Genbank Accession No. NM_012495
gtcccccccaccccagctgaataggctgcgttctcttggaacgcgccgcagaacgaggttctgtgaccctagccgcgttccctccttagttcctttcgcctacccacccgcgtacccgacagacccaccccgtcctgtgccaggaaagcgctgccaccggcaccatgccccacccatacccagcactgaccccggagcagaagaaggagctggctgacatcgctcaccgaattgtagctccgggcaagggcatcctggctgcagacgagtccactggaagcattgccaagcgcctgcagtccattggcaccgagaacaccgaggagaacaggcgcttctaccgccaactgctgctgactgccgatgaccgtgtgaatccctgcattggaggggtgatccttttccacgagacactgtaccagaaggcagatgatggccgtcccttcccccaagttatcaagtccaagggtggtgttgtgggcattaaggtagataagggtgtagtgcccctggctggaaccaatggcgagaccactactcaagggctggacgggctgtctgagcgctgtgcccagtataagaaggatggagccgactttgccaagtggcgctgtgtgctaaagattggggagcatactccctcgtccctcgccatcatggaaaatgccaatgttctggcccgttacgctagcatctgccagcagaatggcattgtacccattgtggagcctgaaattctccctgatggggaccatgacttgaagcgctgccagtatgtaactgagaaggtactggcagctgtctacaaggctctgagtgaccaccatgtctatctggaaggcacactgctgaagcccaacatggtcacccctggccatgcttgcacccagaaattttccaatgaggaaattgccatggcaaccgtcacagcacttcgtcgaacagtgccccctgccgtccctggggtcactttcctgtctggagggcagagtgaggaagaggcatccatcaacctcaatgctatcaacaagtgtcccctgctgaagccatgggccttgactttctcctatggccgagccctgcaggcctctgctctaaaggcttggggtgggaagaaggagaacctgaaggcagcccaggaggagtacatcaagcgagccctggccaacagcctcgcttgtcaaggaaagtacactccaagtggccagtctggagccgcagccagtgaatctctcttcatctctaaccatgcctactaaccagagctgatctaaggctgctccatcgacactccaggcccctgcctacccacttgctattgaagaggggccttcaggctctttcccatcactcttgctgccctcgtgtgtgcagtgttgtctgtgaatgctaaatctgccatcccttccagcccactgccaataaacagctatttaaggggg

SEQ ID NO: 14 - DNA, 781 bp, Rattus norvegicus
  Genbank Accession No. NM_012515
tgtggatctttccagaacagcagttgcaatcactatgtctcaatcctgggtacccgccgtgggcctcactctggtgcccagcctggggggcttcatgggagcctactttgtgcgtggtgagggcctccgctggtatgctagcttgcagaaaccctcctggcatccgcctcgctggacactcgctcccatctggggcacactgtattcggccatggggtatggctcctacataatctggaaagagctgggaggtttcacagaggaggctatggttcccttgggtctctacactggtcagctggctctgaactgggcatggccccccatcttctttggtgcccggcagatgggctgggctttggtggacctcatgcttgtcagtggggtggcaaccgccactaccctggcttggcaccgagtgagcccaccggctgcccgcttgctgtatccttacctggcctggctggcctttgccaccatgctcaactactatgtatggcgtgataactctggtcggcgagggggctcccggctcacagagtgaggacacctagccatcaggaatgcagccctgccagccaggcatcatgggttgaggtcatcctgctttcatgaccattgggcctgctggtctacctggtcttagtccaggaagccaccaggtaggtcaaggtggtcagtgctaagtcccatgcggggacagttgtacctgcttttctgcactgctgcaggcgtgccctaggagcatggggcctttaaagctaaataaagtctttaactt

SEQ ID NO: 15 - DNA, 2495 bp, Rattus norvegicus
  Genbank Accession No. NM_012520
attgcctaccccgggtggagaccgtgctcgtccggccctcttgcctcacgttctgcagctctgcagctccgcaatcctacaccatggcggacagccgggacccagccagcgaccagatgaagcagtggaaggagcagcgggcccctcagaaacccgatgtcctgaccaccggaggcgggaacccaataggagataaacttaatatcatgactgcggggccccgagggcccctcctcgttcaagatgtggttttcaccgacgagatggcacactttgacagagagcggattcctgagagagtggtacatgcaaagggagcaggtgcttttggatactttgaggtcacccacgatattaccagatactccaaggcaaaggtgtttgagcatattgggaagaggactcctattgccgtccgattctccacagtcgctggagagtcaggctcagctgacacagttcgtgaccctcgtgggtttgcagtgaaattctacactgaagatggtaactgggacctcgtgggaaacaacacccctattttcttcatcagggatgccatgttgtttccatcctttatccatagccagaagagaaacccacaaactcacctgaaggaccctgacatggtctgggacttctggagtctttgtccagagtctctccatcaggttactttcttgttcagcgaccgagggattccagatggacatcggcacatgaatggctatggctcacacaccttcaagctggttaatgcgaatggagaggcagtgtactgcaagttccattacaagactgaccagggcatcaaaaacttgcctgttgaagaggcaggaagacttgcacaggaagacccggattatggcctccgagatcttttcaatgccatcgccagtggcaattacccatcctggactttttacatccaggtcatgactttcaaggaggcagaaaccttcccatttaatccatttgacctgaccaaggtttggcctcacaaggactaccctcttataccagttggcaaactggtcttaaacagaaatcctgctaattattttgctgaagttgaacagatggcttttgacccaagcaacatgccccctggcattgagcccagcccggacaagatgctccagggccgcctttttgcttacccagacactcaccgccaccgcctgggaccaaactatctgcagatacctgtgaactgtccctaccgtgctcgcgtggccaactaccagcgcgatggccccatgtgcatgcatgacaaccagggtggtgctcccaactactaccccaacagcttcagcgcaccagagcagcagggctcggccctggagcaccatagccagtgctctgcagatgtgaagcgcttcaacagtgctaatgaagacaacgtcactcaggtgcggacattctatacgaaggtgttgaatgaggaggagaggaaacgcctgtgtgagaacattgccaaccacctgaaagatgctcagcttttcattcagaggaaagcggtcaagaatttcactgacgtccaccctgactacggggcccgagtccaggctcttctggaccagtacaactcccagaagcctaagaatgcaattcacacctacgtacaggccggctctcacatagctgccaagggaaaagctaacctgtaaagcacgggtgctcagcctcctcagcctgcactgaggagatccctcatgaagcagggcacaagcctcaccagtaatcatcgctggatggagtctcccctgctgaagcgcagactcacgctgacgtctttaaaacgataatccaagcttctagagtgaatgatagccatgcttttgatgacatttcccgagggggaaattaaagattagggcttagcaatcacttaacagaaacatggatctgcttaggacttctgtttggattattcatttaaaatgattacaagaaaggttttctagccagaaacatgatttgattagatatgatatatgataaaatcttggtgattttactatagtcttatgttacctcacagcctggtatatatacaacacacacacacacacacacacacacacaccaaaacacacatacactatacacacacacacacacacacactaaaacacacatacacaacacacacatacactacacacacagaacacacaacacaaacatacacacataggcacacacacacacacacacacacacacacacacacacacacacacacatgaatgaagggattataaagatggcccacccagaatttttttttatttttctaaggtccttataagaaaaaccatacttggatcatgtcttccaaaaataactttagcactgttgaaacttaatgtttattcctgtgtagttgattggattccttttccccttgaaattatgtttatgctgatacacagtgatttcacatagggtgatttgtatttgcttacatttttacaataaaatgatcttcatgg

SEQ ID NO: 16 - DNA, 1146 bp, Rattus norvegicus
  Genbank Accession No. NM_012529
atgcccttctccaacagccacaacacgcagaagctgcgcttcccggccgaggatgaattccctgatctgagcagccacaacaaccatatggccaaggtgctgacccccgagctgtacgcggagctccgtgccaagtgcacgccgagcggctttacgttggacgacgccatccagactggcgtagacaatccgggccacccgtacatcatgacagtgggtgcagtggcgggcgacgaggagagttacgacgtattcaaggaccttttcgaccccatcatcgaggaccggcacggcggctaccagcccagtgatgagcacaagactgacctcaacccagacaacctgcagggcggcgatgacctggaccccaactacgtgctgagctcgcgggtgcgcacaggccgaagcatccgcggcttctgcctcccccctcactgcagccgtggggagcgccgcgccatcgagaagctggcagtagaagccctgtccagcctagatggcgacctgtctggcaggtactatgcgctcaagagcatgaccgaggcggacgagcagcagctcattgacgaccacttcctcttcgacaagcctgtgtcgcctctgctgctggcctccgcgatggcccgcgactggccggatgctcgcggcatttggcacaatgacaataagacgttcctggtgtggatcaacgaggaggaccacctgcgggttatctccatgcagaaagggggcaacatgaaggaagttttcacgcgattctgcactggcctcactcagattgaaactctcttcaagtctaagaactatgagttcatgtggaaccctcacctgggctacatcctcacgtgcccatccaacctgggcactgggcttcgggcaggcgtgcacatcaagctgccccacctgggaaagcacgagaagttctcggaggtgctcaagcgactgcggcttcagaagcgaggcacaggtggtgtggacaccgctgctgtgggtggagtttttgatgtctccaacgctgaccgcctgggcttctcggaggtggagctggtgcagatggtggtggacggagtgaagctactcattgagatggagcagcggcttgagcagggtcagcccattgacgacctcatgcctgcccagaagtga

SEQ ID NO: 17 - DNA, 3112 bp, Rattus norvegicus
  Genbank Accession No. NM_012551
cgcagaacttggggagccgccgccgcgattcgccgccgccgccagcttccgccgccgcaagatcggcccctgccccagcctccgcggcagccctgcgtccaccacgggccgcggccaccgccagcctgggggcccacctacactccccgcagtgtgcccctgcaccccgcatgtaacccggccaacatccggcgagtgtgccctcagtagcttcggccccgggctgcgcccaccacccaacatcagctctccagctcgcacgtccgggatggcagcggccaaggccgagatgcaattgatgtctccgctgcagatctctgacccgttcggctcctttcctcactcacccaccatggacaactaccccaaactggaggagatgatgctgctgagcaacggggctccccagttcctcggtgctgccggaaccccagagggcagcggcggcaataacagcagcagcagcagcagcagcagcagcgggggcggtggtgggggcggcagcaacagcggcagcagcgctttcaatcctcaaggggagccgagcgaacaaccctacgagcacctgaccacagagtccttttctgacatcgctctgaataacgagaaggcgctggtggagacaagttatcccagccaaactacccggttgcctcccatcacctatactggccgcttctccctggagcctgcacccaacagtggcaacactttgtggcctgaaccccttttcagcctagtcagtggccttgtgagcatgaccaaccctccaacctcttcatcctcagcgccttctccagctgcttcatcgtcttcctctgcctcccagagcccacccctgagctgtgccgtgccgtccaacgacagcagtcccatttactcagctgcacccacctttcctactcccaacactgacatttttcctgagccccaaagccaggcctttcctggctctgcaggcacagccttgcagtacccgcctcctgcctaccctgccaccaagggtggtttccaggttcccatgatccctgactatctgtttccacaacaacagggagacctgagcctgggcaccccagaccagaagcccttccagggtctggagaaccgtacccagcagccttcgctcactccactatccactatcaaagccttcgccactcagtcgggctcccaggacttaaaggctcttaataacacctaccagtcccaactcatcaaacccagccgcatgcgcaagtaccccaaccggcccagcaagacacccccccatgaacgcccgtatgcttgccctgttgagtcctgcgatcgccgcttttctcgctcggatgagcttacacgccacatccgcatccatacaggccagaagcccttccagtgtcgaatctgcatgcgtaatttcagtcgtagtgaccaccttaccacccacatccgcacccacacaggcgagaagccttttgcctgtgacatttgtgggagaaagtttgccaggagtgatgaacgcaagaggcataccaaaatccacttaagacagaaggacaagaaagcagacaaaagtgtcgtggcctcctcagctgcctcttccctctcttcctacccatccccagtggctacctcctacccatcccccgccaccacctcatttccatccccagtgcccacctcttactcctctccgggctcctctacctacccgtctcctgcacacagtggcttcccatcgccctcggtggccaccacctatgcctccgtcccacctgctttccctgcccaggtcagcaccttccagtctgcaggggtcagcaactccttcagcacctcaacgggtctttcagacatgacagcaaccttttctcctaggacaattgaaatttgctaaagggaatgaaagagagcaaagggaggggagcgcgagagacaataaaggacaggagggaagaaatggcccgcaagaggggctgcctcttaggtcagatggaagatctcagagccaagtccttctagtcagtagaaggcccgttggccaccagccctttcacttagcgtccctgccctccccagtcccggtccttttgacttcagctgcctgaaacagccacgtccaagttcttcacctctatccaaaggacttgatttgcatggtattggataaaccatttcagcatcatctccaccacatgcctggcccttgctcccttcagcactagaacatcaagttggctgaaaaaaaaaatgggtctgggccctcagaaccctgccctgtatctttgtacagcatctgtgccatggattttgttttccttggggtattcttgatgtgaagataatttgcatactctattgtactatttggagttaaattctcactttgggggagggggagcaaagccaagcaaaccaatggtgatcctctattttgtgatgatcctgctgtgacattaggtttgaaacttttttttttttttgaagcagcagtcctaggtattaactggagcatgtgtcagagtgttgttccgttaattttgtaaatactgctcgactgtaactctcacatgtgacaaaatacggtttgtttggttgggttttttgttgtttttgaaaaaaaaattttttttttgcccgtccctttggtttcaaaagtttcacgtcttggtgcctttgtgtgacacaccttgccgatggctggacatgtgcaatcgtgaggggacacgctcacctctagccttaagggggtaggagtgatgtttcaggggaggctttagagcacgatgaggaagagggctgagctgagctttggttctccagaatgtaagaagaaaaatttaaaacaaaaatctgaactctcaaaagtctatttttttaactgaaaatgtagatttatccatgttcgggagttggaatgctgcggttacctactgagtaggcggtgacttttgtatgctatgaacatgaagttcattattttgtggttttattttacttcgtacttgtgtttgcttaaacaaagtgacttgtttggcttataaacacattgaatgcgctttactgcccatgggatatgtggtgtgtatccttcagaaaaattaaaaggaaaataaagaaactaactggt

SEQ ID NO: 18 - DNA, 1725 bp, Rattus norvegicus
  Genbank Accession No. NM_012554
agtgctgctccggtaccgagtcgcgctcacgtttgtccttaagactcccttcggtgtctccaggaccctctttccttcctccgcagcgatcctactgccagaacttcaccatgtccattctcaagatccatgccagagagatctttgactcccgcgggaatcccaccgttgaggtggatctctacaccgcaaaaggtctcttccgtgctgcggtgcccagcggtgcgtccactggcatctacgaggccctagaactccgagacaatgataagacccgcttcatggggaagggtgtctcaaaggctgttgagcacatcaataaaactattgcacctgctctggttagcaagaaactgaatgttgtggagcaggagaagattgaccagctgatgatcgagatggacggcacagagaataaatctaagtttggtgcaaatgccatcctgggagtgtccctggctgtctgcaaggctggtgccgtggggaagggggtgcccctttaccgtcacattgccgacttggccggcaaccctgaagtcactctgccggtcccagctttcaatgtgatcaacggcggttctcatgctggcaacaagttggccatgcaagagttcatgatcctgcctgtgggggcatcctctttccgggaagccatgcgcattggagcagaggtttaccacaacctgaagaacgtcatcaaagagaagtacgggaaagacgccaccaatgtgggtgatgagggtggattcgcacctaacatcctggagaacaaagaagcactggagctgctcaagtctgccattgcaaaggccggctacactgaccaggttgtcatcggcatggatgtggctgcctccgagttctacagggctggcaagtatgacctggacttcaagtctccagatgatgccagccggtacatcacacccgaccagctggccgacctgtacaagtccttcatcaaggactacccagtggtgtccattgaagatccctttgaccaggacgactgggatgcttggcagaagttcacagctactgcaggcatccaggtggtgggggatgacctcacagtgaccaaccctaagcggatcgccaaggctgcaggcgaaaagtcctgcaactgcctcctgctcaaagtgaaccagattggctctgtgaccgagtctctgcaggcgtgtaagctggcccagtccaatggctggggtgtcatggtgtcccatcgatctgaggagactgaggacactttcattgccgacctggtggtggggctctgcactgggcagatcaagactggtgccccctgccgatctgagcgcctggccaagtacaatcagatccttagaatcgaggaggaactgggcagcaaagccaagtttgccggcaggtccttcaggaaccccctggccaagtaaggcatggaccggagatccctggagctaccagatcctctgtctccgtcatccaggcggctcaaggctggcccagtgcttgcccctcccatgtcactgcttccttagatgtccaccccgaccacctggagccctgctggagcccccagctttgtaatcatgtgatcagtctgaatcattgtttctgtcacctgactttccagctagtgtctggagccctctgaactccagcgtaatctctagagtgcccacaccatcaagactccccccagtggtttacttgcaaaaataaaagctgcagaagctcaaaaaa

SEQ ID NO: 19 - DNA, 1358 bp, Rattus norvegicus
  Genbank Accession No. NM_012559
agtgctggctgtaaggggctgggagcaccggtcacccagacactatgaattggtccttgcaactccggagtttcattctatgctgggcgcttttactactttctccaacgggcctggcacagtacactgctactagagataactgttgcatcctagatgagagattcggtagttactgcccaaccacttgtggcatctcagacttcctgaattcttaccaaaccgacgtggacactgacctccagactctggaaaacatcttacaacgagctgaaaacagaaccacagaagccaaggaactgattaaagccatccaggtttactacaacccggaccaacccccaaagccgggtatgatagagggtgccactcagaagtctaagaagatggtagaagaaatcttgaagtacgaagcactgttactaacccatgagtcgagtatccggtatttacaggacatctatacttcaaataagcagaagatcacgaacctgaaacagaaggtggcccagcttgaagctctgtgccaggagccttgcaaggactctgtgcgaatctatgacataaccggaaaagattgtcaggataccgccaacaagggtgccaaagaaagtggactttactccattcggcctttgaaagccacggagcagttcttagtgtactgtgaaaccgacggacctggaaatggctggaccgaattcaagaagaggcttgatggcagtgtggatttcttgaagaactggattcagtataaagaaggatttggacacctgtcacctactggcaccacagagttttggctgggcaatgagaagaatcatctgataagcatgcagtccaccatcccatacgcactgagaatacagctcaaagactggagtggcaggaccagcaccgcggactatgccatgttcagggtgggtcctgaatccgacaaataccgcctgacctatgcctacttcattggtggagatgccggggatgccttcgacggctacgattttggtgatgatcccagtgacaagtttttcacatcccacaacggcatgcacttcagtacctgggacaatgacaacgacaagttcgaaggcaactgtgctgagcaggatggatctggctggtggatgaacaagtgtcacgctggccacctcaatggagtttattaccaaggtggcacttactccaagtcatctactcctaacggttatgacaatggcattatttgggccacgtggaaaacccgctggtattccatgaaggaaaccaccatgaagataattcccttcaacagactctccattggagatgggcagcaacatcacatgggaggatccaaacaggttggagacatgtaa

SEQ ID NO: 20 - DNA, 870 bp, Rattus norvegicus
  Genbank Accession No. NM_012580
atggagcgcccacagctcgacagcatgtcccaggatttgtccgaggccttgaaggaggccaccaaggaggtgcacatccgtgcagagaattctgagttcatgaggaactttcagaagggtcaggtgtccagggaaggctttaagctggtgatggcctccttgtaccatatctatacggccctggaagaggagatagagcgaaacaagcagaacccagtctatgccccgctctacttccctgaggagctgcaccgaagggctgccctagagcaggacatggccttctggtatgggccccactggcaggaggccatcccttacacaccagccacacagcactacgtaaagcgtctccacgaggtgggaggtactcatcctgagctgctggtggcccacgcatatacccgctacctgggtgacctctcagggggtcaggtcctgaagaagattgcgcagaaggccatggccttgccaagctctggggaaggcctggcttttttcaccttcccgagcatcgacaaccccaccaagttcaaacagctctatcgtgctcgcatgaacactctggagatgacccccgaggtcaagcacagggtgacagaagaggctaagaccgccttcctgctcaacattgagctgtttgaggagctgcaggcactgctgacagaggaacacaaagaccagagtccctcacagacagagtttcttcgccagaggcctgctagcctggttcaagatactacctctgcagagacgccccgaggaaaatcccagatcagcactagttcatcccagacaccgctcctgcgatgggtcctcacactcagtttcctgttggcgaccgtggcagtgggaatttatgccatgtaa

SEQ ID NO: 21 - DNA, 1269 bp, Rattus norvegicus
  Genbank Accession No. NM_012585
atggatgtgttcagttttggccagggcaacaacaccacagcgtcccaggagccctttgggaccggcggcaacgttactagcatctccgacgtgaccttcagctaccaagtgatcacctctctgttgctgggtactctcattttctgcgcggtgctcggcaatgcctgcgtggttgctgccatcgccctggagcgctccctccagaatgtggccaactatctcatcggctccttggcggttactgatctcatggtatcagtgctggtgctgcccatggctgctctgtaccaggtgctcaacaagtggaccctgggccaggtcacctgcgacctgtttatcgccctggatgtactgtgctgcacctcgtccatcctgcacctgtgcgccatcgcgctagacaggtactgggctatcaccgaccctatagactatgtgaacaaaaggacgccccggcgcgccgctgcgctgatctcgctcacttggctcattggctttctcatctccatcccgcccatgctgggctggcgcaccccggaagaccgatcggaccccgacgcgtgcaccatcagcaaggaccacggctacaccatctactccactttcggcgctttctatatcccgctgttgctcatgctggttctctacgggcgcatcttcagagccgcacgcttccgaatccgcaagactgtcaggaaggtggaaaagaagggagcaggcaccagcttaggaacttcgtcggcaccgccccccaagaagagcctgaacggacagccaggtagtggggactggaggcgctgtgctgagaacagggcggtggggactccgtgcactaatggggcagtgaggcagggtgacgacgaggccaccctggaggtgatcgaggtgcaccgagtgggcaactccaaagagcaccttcctctgcccagcgagtcaggatctaactcctatgcccccgcctgcttggagagaaaaaatgagcgcaatgctgaagcaaagcgcaagatggccttggcccgtgaaaggaagacggtgaagactctgggcatcatcatgggcaccttcatcctctgctggctgccgtttttcattgtggctctggtcctgcctttctgtgaaagcagctgccacatgcctgcgttgttgggtgccataattaactggctaggctactccaactccctgctcaatccggttatttatgcttatttcaacaaagactttcaaaacgcttttaagaagataatcaagtgcaagttctgccgccgatga

SEQ ID NO: 22 - DNA, 2352 bp, Rattus norvegicus
  Genbank Accession No. NM_012588
gggagcagcgagcaagcaggtcctcagcgtccagtcaccgctctaagccaggcgccatgcatcccgcgcgccccgcgctctgggcggctgcgctcaccgccctcactctgctccgcggaccgccagtggcgcgggccggcgcgggcgcggtgggcgcgggccccgtggtgcgctgcgaaccgtgcgacgcgcgtgcgctggcccagtgcgcgcctccgcccaccgcgcccgcgtgcacggagctggtgcgagaacccggctgcggctgctgcctgacttgcgcgctgcgcgaaggcgacgcgtgcggcgtctacacggagcgctgtggcaccggcctccgctgccagccgcgaccggccgagcagtatcccctgaaggcgctgctgaatggccgcgggttctgcgccaacgccagcgccgccagcaacctgagtgcctacctcccctcccagccgtctcctggaaacaccactgagtctgaggaggaccacaatgctgggagtgtggaaagccaggttgtccccagcacacatcgcgtgactgattccaagttccatccactccattcaaagatggaggtcatcataaaaggccaggctagggacagccagcgctacaaagttgactatgagtcccagagcacagacacccagaacttctcctccgagtctaagcgggagacagaatatggtccctgccgcagagaaatggaggacacactgaatcatctgaagttcctcaatgtgctgagtcccaggggcgtccacatcccaaactgtgacaagaaggggttctataagaagaaacagtgtcgcccttccaaaggcagaaagcggggcttctgctggtgcgtggacaagtacgggcagccattgccaggctatgacaccaaggggaaagacgacgtgcattgcctcagcgtgcagagccagtagataccgctgtgccacttaacgtggagctcaaatacgccttattttgcacaaaagactgccaacaacgtgatcagcagctggctataccttgatttatatttctctctctctctctctctctctctctctctctctctctctcttttgtggtgaactgaataaaaacaaacaaaacacatacaaaaacaaaaacaaaaaaaaaagccaagtttagacagatttctgaaatgcctctggttgtttaaatagtgaacttggtcatctttgtatctcgcagtagtcaaccaaaagcagtttgaattttcttgttgcttcctatgaaaaccacacgtgtactccaggccacggatgccgtcgccccctaactcacccacccactgtgggcttcagtgctgctggccctctgccttcttgatttcagaggctctgttgctgatagagaaaaaccctctttccatcccctgtaagtaagtgcaggcactgtggagaatggggaagcctggaacccagtgacccggacgtctggaagcatcctcctgaggcctctggtccttattgtgccatctctgaatcaagggcctggccctgtatctgcaagtggcctgacctacttgggaactgtgggagagaaaaatgtgttgtctctcttactaaaaatgactaagaatgttctagggcgctccgagagcccataaagacaaggacaaggaccttcctttgtcaggcagcttcctgatgacttggcccagcagaaatatcaaactccatgtgcagagatgtcgcaaataacggtgcgcttagttctccggatgacttcaagaaaacagtgttttctggcccagcctctcaaaataaaatttgttgtggggtggggctgaggggaggcagctttcaaaagagagaaggttttcatcttccttgttggagaccctggtaagaacatggagagaatcacctgtttgttgatcttggggtccttctcaaactttctttataattcatgcgtatatgcagacaaaatatgttcttaattgttaacattgtatacaacatagcccaaatatattagaatctgtactagataatcctagataaaaggttagagatgctaggtgatgtaaccacagacacgcccgaggaaaggagcctgtgtctggaggctgggccgctttccccgaggccaaggccatggtggtctggcaatacagggtgtgaggagactgtactgcatcccacggggtggacatgcgctgtacagagctttccttgagagcacaaaggaatcttgagacattctgcctgcctgtcagcttttctttatttttttaattaagtttttgggggaaaaatgtatttttgaaaagtttgtcttgcaatgtatttataaatagtaaataaagtttttttactatttaag

SEQ ID NO: 23 - DNA, 1046 bp, Rattus norvegicus
  Genbank Accession No. NM_012589
agctcattctgtctcgagcccaccaggaacgaaagtcaactccatctgcccttcaggaacagctatgaagtttctctccgcaagagacttccagccagttgccttcttgggactgatgttgttgacagccactgccttccctacttcacaagtccggagaggagacttcacagaggataccacccacaacagaccagtatataccacttcacaagtcggaggcttaattacatatgttctcagggagatcttggaaatgagaaaagagttgtgcaatggcaattctgattgtatgaacagcgatgatgcactgtcagaaaacaatctgaaacttccagaaatacaaagaaatgatggatgcttccaaactggatataaccaggaaatttgcctattgaaaatctgctctggtcttctggagttccgtttctacctggagtttgtgaagaacaacttacaagataacaagaaagacaaagccagagtcattcagagcaatactgaaaccctagttcatatcttcaaacaagagataaaagactcatataaaatagtccttcctaccccaacttccaatgctctcctaatggagaagttagagtcacagaaggagtggctaaggaccaagaccatccaactcatcttgaaagcacttgaagaatttctaaaggtcactatgaggtctactcggcaaacctagtgtgctatgcctaagcatatcagtttgtggacattcctcactgtggtcagaaaatatatcctgtcgatgggtatctaaattatgttgttctctacgaagaactggcaatatgaatgttgaaacactattttaattatttttaatttattgataatttaaataagtaaactataagttaatttatgattgatatttatactttttatgaagtgtcacttgaaatattatgttatagttttgaaaagataatataaaaatctatttgatatgaatattctcttacctagccagatggtttcttgcaatatataagtttacctcaatgaattgctaatttaaatttttt

SEQ ID NO: 24 - DNA, 2168 bp, Rattus norvegicus
  Genbank Accession No. NM_012603
actcgctgtagtaattccagcgagagacagagggagtgagcgggcgggttggaagagcccagtgtgcagagccccactccgggcttcctaggaaggcagctctggagtgagaagggctttgcctccaggcttgctgcctcctcgacccaatcctcccgctgacccaacatcagcggtcgcaaccctcgccgcctctgggaaactttgcccattgcaacgggcagacacttctcactggaacttacaatctgcgagccaggacaggactccccaggcgcaggggagggaatttttgtctatttggggacagtgttctctgcctctgcccgcgatcggctcccctgaaaagagctcctcgcgttatttgaagcctgaatttcctttgggaggtggaaaacccgacagtcacgacgatgcccctcaacgtgagcttcgctaacaggaactatgacctcgactacgactcggtgcagccctatttcatctgcgacgaggaagagaatttctatcaccagcaacagcagagcgagctgcagccgcccgcacccagtgaggatatctggaagaaattcgagctgctgcccaccccgcccctgtcccccagccgccgctccgggctctgctctccgtcctatgtcgcggtcgctacgtccttctccccaagggaggacgatgacggtggcggtggcaacttctccaccgccgatcagctggagatgatgaccgagctacttggaggagacatggtgaatcagagcttcatctgcgatcctgacgatgagaccttcatcaagaacatcatcatccaggactgtatgtggagcggcttctcggccgctgccaaactggtctccgagaagctggcctcttaccaggctgcgcgcaaagacagcaccagcctgagccccgcccgcgggcacagcgtctgctccacctccagcctgtacctgcaggacctcaccgccgcagcgtccgagtgcatcgacccctcagtggtcttcccctacccgctcaacgacagcagctcgcccaaatcctgtacctcgtccgattccacggccttctcttcttcctcggactcgctgctgtcctccgagtcctccccacgggccacccctgagcccctagtgctgcatgaagagacaccgcccaccaccagcagcgactctgaagaagaacaagatgatgaggaagaaattgatgtggtgtctgtggaaaagaggcaaccccctgccaagaggtccgagtcagggtcatccccatcaagaggccacagcaaacctccacacagcccactggtcctcaagaggtgccatgtctctactcaccagcacaattatgcagcacccccctccacaaggaaggactatccagctgccaagagggccaagttggacagtggcagggtcctgaaacagatcagcaacaaccgcaaatgctccagccccaggtcctcagacaccgaggaaaacgacaagaggcggacacacaacgtcttggaacgtcagaggagaaacgagctgaagcgtagcttttttgccctgcgcgaccagatccctgagttggaaaacaacgaaaaggcccccaaggtagttatcctcaaaaaagccaccgcctacatcctgtccgttcaagcagatgagcacaaactcatctcagaaaaggacttactgaggaaacggcgagaacagttgaaacacaaactcgaacagcttcgaaactctggtgcataaactgaccggaagtgaggaggagctggaatctcgagtgtaaggagaacggttccttctgacagaacttggacttcaaaaaatgcatgctcaaagcctaacctcacaaccttggctggggctttgggacttcagccataatgttaactgcctcaaagttaaggcataaaagaacttttttttatgcttcccatcttctttctttttcctttaacagatttgtatttaattgttttttttaaaaaaatcttccggtgtacatagggcctttaaatgtaaataactttaataaaacgtttataacagttatacaagattttaagacatgtatgataaaccataattttttttatttaaagaccttttcatttttaaagttgatttttttctattgtttttagaaaaaataaaataattggaaaaaatataattgagcca

SEQ ID NO: 25 - DNA, 2442 bp, Rattus norvegicus
  Genbank Accession No. NM_012615
gacagaaaacctagagatggaattaaattatggccagctctcacaaggtcaactttgatgtattacgtgaatgatggagtgtatgggtcatttaactgcattctttatgaccatgcacatgtcagtccctgcagccgccgccgccggccgccttcagtcagcagctcggcgccacctccggtcggcgactgcggcgggctcgacgaggcggctgacggggcggcggcgggaagacggccgggtgcgccttggggtttagtggcggcttctccatgggtccagccagccgcttccctgtgctgtgagtgtttccaccactccaggagacagcattcagagttgaccttgtgagagctggccataatttaattccatctctaggttttctgtcttattgtttcagaggcacatcgagaaccaaccatgggcagctttactaaggaagagtttgactgccatatcctcgatgaaggtttcactgctaaggacattctggaccaaaaaatcaatgaagtttcttcctctgatgataaggatgctttctatgttgcggacctcggagacgttctaaagaagcatctgaggtggctgaaagctcttccccgtgttactcccttctatgctgtcaagtgtaatgacagcagagccatagtgagcaccctggctgccattgggacaggatttgattgtgcaagcaagactgaaatacagttggtgcaggggcttggggtgcctccagagaggattatctatgcaaatccttgtaagcaagtgtctcagatcaagtatgctgccagtaatggagtccagatgatgacttttgacagtgaaattgagttgatgaaagttgccagagcacatccaaaggcaaagttggttttgcggattgccactgatgattccaaagcagtttgtcggctcagtgttaagtttggtgccacactgaaaaccagcaggcttctcttggaacgggcaaaagagctaaatattgatgtcattggtgtcagcttccatgtgggcagtgggtgtactgaccctgagaccttcgtgcaggcagtgtcagatgcccggtgtgtctttgacatgggaacagaagttggtttcagcatgtatctgcttgacattggtggtggctttcctgggtctgaagacacgaagcttaaatttgaggagatcaccagtgtaatcaacccagctctggacaagtacttcccatcggactctggagtgagaatcatagctgagccaggcagatactacgtcgcatcagctttcacacttgcagtgaatatcattgccaaaaaaaccgtgtggaaggagcagaccggctcggacgatgaagatgagtcaaacgagcaaactttgatgtattacgtgaatgatggagtgtatgggtcatttaactgcattctttatgaccatgcacatgtgaaggccctgctgcagaagagacccaagccagatgagaagtattactcatccagcatctggggaccaacatgtgatggccttgatcggatcgtcgagcgctgtagcctgcctgaaatgcatgtgggtgattggatgctgtttgagaacatgggtgcatacactgttgctgctgcttctactttcaatgggttccagaggccaaacatctactacgtaatgtcacggtcaatgtggcaactcatgaagcaaatccagagccatggcttcccgccagaagtggaggagcaggatgttggcactctgcccatgtcttgtgcccaggagagcgggatggaccgtcaccctgcagcctgtgcttctgctagtatcaatgtatagatgccattcttgtagctcttacctgcaagtttagcttgagttcacggcatttggggggaccatttaacttaattactgctagtttggaatgtctttgtaagagtagggttggcaccaatgcagtatggaaagactaggagatgggggtcacacttactgtgttcctatggaaactttgaatattttatatggatttttattcacttttcagacctgatactaatgagtgcccctcggctgctgagcaagcatttgtagcttgtacattggcagaatgggctaaaagcttatgttgtgacccattttgaaaataaagtatcttgaaatgattggacattggagaatgtgtgcaagtatcccttacagaaggcacaaacttctgcacaggctgtgtgttacagcagtgagtctagcccagcagagatgtggatgatacaaagctgtgccccctctgtacagcatcaatgtgcttagcccatctcaagtgtttactgtgaacttggtgcccaaagtctcttaagagtgtcatctgcctagtggcctcttgacttggccacttcctaaggagagggcatctgaggctctttgaaccttgcctgcagaaaccctgactgctccctcaacccttggccg

SEQ ID NO: 26 - DNA, 487 bp, Rattus norvegicus
  Genbank Accession No. NM_012618
aaaacctctctgttcagcacttcctctctcttggtctggtctcaacggtcaccatggcgagacccttggaggaggccctggatgtaatagtgtccaccttccacaaatactcaggcaacgagggtgacaagttcaagctgaacaagacagagctcaaggagctactgaccagggagctgcctagcttcctggggagaaggacagacgaagctgcattccagaagctgatgaacaacttggacagcaacagggacaatgaagttgacttccaggagtactgtgtcttcctgtcctgcattgccatgatgtgcaatgaattctttgagggctgcccagataaggagccccggaagaagtgaagactcctcagatgaagtgttgggccagtgggggaatcttccatgttggctgtgagcatagtgccttactctggcttcttcatacatgtgcacagtgctgagcaagtttaataaagagttttgaaact

SEQ ID NO: 27 - DNA, 3053 bp, Rattus norvegicus
  Genbank Accession No. NM_012620
cccccgagagctttgtgaaggaggaacgctgcacacccgcctcccgcagcacacagccaaccacagctgagcgacacgcaacaagagccaatcacaaggcacttccgaaagctccaggatgcagatgtcttcagccctcacttgcctcaccctgggcctggttctggtctttgggaaagggttcgcttcaccccttccagagtcccatacagcccagcaggccaccaacttcggagtaaaagtgtttcagcatgtggtccaggcctccaaagaccgaaatgtggtcttctctccctacggcgtgtcctcggtgctggctatgctgcagctgaccacagcagggaaaacccggcagcagatccaagatgctatgggattcaatatcagtgagaggggcacagctcctgccctccgaaagctctccaaggagctcatggggtcatggaacaagaatgagatcagtactgcggacgccatctttgtccagcgggacctagagctggtccagggcttcatgccccacttcttcaagctcttccggaccacggtgaagcaggtggacttctcagaggtggaaagagccagattcatcatcaacgactgggtggagaggcacaccaaaggtatgatcagtgacttactggccaagggggctgtaaatgagctgacacgcctggtgctggtgaacgccctctatttcaacggccaatggaagacccccttcttagaggccagcacccaccagcgcctgttccacaagtctgatggtagcaccatctccgtgcccatgatggctcagaacaacaagttcaactacactgagttcaccactccggatgggcacgagtacgacatcctggaactgccctaccacggcgaaaccctcagcatgttcattgcagcaccctttgaaaaagatgtgcccctctccgccatcaccaacattttggacgctgagctcatcagacaatggaagagcaacatgaccaggctgccccgcctcctcatcctgcctaagttctctctggagactgaagtggacctcagagggcccctggagaagctgggcatgactgacatcttcagctcaacccaggccgacttcacaagtctttccgaccaagagcagctctctgtagcacaagcactacaaaaggtcaagatcgaggtgaacgagagcggcacagtggcgtcttcctccacagccattctagtctcagcccgcatggcccccacggagatggttttagaccgatcctttctctttgtggttcggcacaatccaacagagacaatcctcttcatgggccagctgatggagccttgagagtgggatgagaagcctttcctttgggacaaaactggacgtgttataagcagagactctgaagaaaagaattgttttaaggactctttggggagaaagagaaggcctttctttcttaccccggcactggtaaatctttccaaccagcctcccagacctcagactctcgaagaggaaagagtctaactccctcactagggacctatcttactaaggtctcatccaaccatagaactcacagaatctggatctgcccagcattcagcctttggacccagttcccaccaaggccccagcagggccaacccactacgccttcactcagcaaagtcttttgtgttccagtcacactctgggtacctcttgtatcgtcctccattgctatgaaggatgacccaggccaaaggaagaagcactgtcctatctcaaggtccactgtggaaatgaacaccttgcccatccccaaggggcagcagatagacagatcgaatgatcgcccgatatcaagccttctcccagctcccgtcctgccctcccttccctgacagccgccttgtgttatttcagagtgtagatgacttgtttacagcttttttcgacccacaaacttttctcattttgaaagcgtgaaagaaaggtcagatgtgcacgtgccttgctctttatcctgggtctccctgtgaggggagaggggtcctggggagattccaggggtgtgattgaatatttatcttgtttatcttatacgtttgttggggagaagaagcactattaaggagaaagccttttatttaaaccatggcatatggtgtcccatttggggtctgtatccctgtatgtcagggaggcatcactccacaaacccgcccctcgggtggcccggcgtcggggctcacactgccgcctagtggcagccgaacacgcccttgccccatccctcccccgcatcctcccccgtggctcttttccttagggatcttgccaaggtgatgcttggcagcccacggtaaaggaagggggaaaaagattaggtgggagagagagagagagagagagagagagagagagagagagagagagagagagagagagagagagagagaaagagagagagatgtttgagagagggcaaagtggtttcaaatttttccaatacattcagaagccgagtgggaaagggggctgtgtgacctaacaggacagaactttctccaattactgggtgactcagctgcactggtgactcacttcaatgtgtcatttccggctgctgtaagtgagcagtggacacgtgggggggggggggtgaggatgaaagaaacagccagctcctggtcaaccaccttagttagataatcttttttgaaagcttcctagctgggggtatgatcagaaaaccaatttactgaaaaactgcacaggaaggtaacgtgaatctaatttcatagcgggccgctctgcatccgttacatctccactggaaaaaaataatcattttctttttgtgtgtgtgtgtgtgttttagcttttctccctctccctctttctctctcatttcattatgcactggataaccatacaccgtgtaccacaggggcccaaatgtggggtcacatggtcttgaattttgtggggtacatatgcctttgtttgtttgttttcacttttgatatataaacaggtaaatgtgtttttaaaaaataataaaaatagagaatatgcagac

SEQ ID NO: 28 - DNA, 1540 bp, Rattus norvegicus
  Genbank Accession No. NM_012645
ggatcgcacatgggggcgatggcaccgcgcacgctgctcctgctgctggcggcggtcctggcccccacccagacctgggcgggctcacactcgctgcggtatttccacaccgccgtgtcccggcccggcctcggggagccccggttcatttctgtcggctacgtggacgacacgcagttcgtgcgctacgacagcgacgcggagaatccgagatacgagccgcgggcgcggtggatggagcgggaggggccggagtattgggaggagcagacactggtcgccaagggacaggagctggattaccgagtgagcctgaggaacctgctaagctactacaaccagagcgagggcggctctcacaccatccagaggatgtatggctgtgacgtggggtccgacgggagcctcctccgcgggtatgagcagcacgcctacgacggccgcgattacatcgccctgaacgaagacctgaaaacatgggctgtggcagactttgcagcatggatcacccggagcaagtggcagcggaatggtgctgcagagagaagcagggcctatctggagggcacgtgtgtggagtggctcctcagatacctggagcgcgggaaggagacgctgctgcgctcagatcccccagaggcacatgtgacccttcaccccagacctgaaggtgatgtgaccctgaggtgctgggccctgggcttctaccctgctgacatcaccctgacctggcagttgaatggggaggacctgacccaggacatggagcttgtggagaccaggcctgcaggggatggaaccttccagaagtgggcatctgtggtggtgcctcttgggaaggagcagaattacacatgccgtgtggagcatgaggggctgcctgagcccctttcccagagatgggagccttctccatccaccgactccaacttacttctgttgttcttggagctgtggcagtttttgtagttttggccatcattggagctatggtggttgttgtgaggaggaggaggagaaacacaggcaggtacagctcccagagctccgttgtgtctctcccagattgtgaagcatgaagacagctgcctggagtggactgagtgacagacgatgtgttcaggtctctcctgtgacatccagagccctcagttctctttagacaccagtgtctgaagttccctgtgattctatggcttcagtgtgaagaactgtggagtccagcctgccctacacaccaggaccctgtccctgcactgcctgtgttgcctaccacattcagccttgctggtccagcctgggggtggagggtggggacatctgcatcctgtccccctgtgccaccctgagcttcagcccctcactccacactgagaataagaatctgagtgtgaacttgattgttcacatccttgacacagtgtggatagctttttaaattactggatggaatacttagaggttttttgttttggggttttgctttgtttccttttgtttttgaaaaaataaatggcagatggagaagcttccagaaaaa

SEQ ID NO: 29 - DNA, 2462 bp, Rattus norvegicus
  Genbank Accession No. NM_012649
tgtgctgttggaaccatggcgcctgtctgcctgtttgcgccgctgctgctgttgctcctcggaggtttccccgtcgccccaggcgagtcgattcgagagactgaggtcatagacccccaggacctcctggaaggcagatacttctctggagccctcccggacgatgaagacgctgggggccttgagcaggactctgactttgagctgtcgggttccggagatctagatgacacggaggagcccaggaccttccctgaggtgatttcacccttggtgccactagataaccacatccccgagaatgcccagcctggcatccgtgtcccctcagagcccaaggaactggaagagaatgaggtcattcccaaaagggtcccctccgacgtgggggatgacgatgtgtccaacaaagtgtccatgtccagcacttcccagggcagcaacatttttgaaagaactgaggtcttggcagctctgattgtgggcggcgtagtgggcatcctcttcgccgttttcctgatcctgctgctggtgtaccgcatgaagaagaaggatgaaggcagttacgacttgggcaagaaacccatctacaaaaaagcccccaccaacgagttctacgcatgaagcttcttcccatgagtgctgcttggacttcatggggagaggagttgaggattgtggacagtggacattggcagagagagggcaccttaatactgacttgtatctccatctctggtcacctttctggtgtcagaagagatatgatcttctactgtgctgcctcagagagagagagagagagagagagagagatgggatggggtgcggagggagtgtccgtgtgtgtgtgtgtgtgtgtgtgtgtgtgtgtgtgtgtgtgtctgtctgtctgtctgagttgccctggcagaaaaatggggttaaacttgttctttcttgaaggcaagcctggaattgggtctttttgttgttgtttcaaatttctagaatagaatgtaggaccagtttagttcctgccgttaacatgtctcatttatgactgcctttattctagaggcaaggagttgggggcaaggagctggaacccgctgcaccttgagatgtgttcacccgagtacttcctcacactacagggtctctgtggtgtatctcggggcattctaggctcagtgacttttgaaattcaaccttttttttttttttttaaatccagggagggtgggactgaagtgctgacagctcatgctgaagtacacttgtagaagatttgtaaaatgtaaggttttttttttttttttttaatggtccattccttcatgggagcgtgtgccctgggctgagagcgtggggatgcacagatgttctttctagaacatattcgttgcaacagctaactttgtgttttcatggttttttatgttttgttttgtttttttgaaaatgagagaagagctggagagatgatttttatgatttttttttgttttgttttttactatttatagcttcagacggggctgcttttctctacctttctgtctttactgtttcccactattttttttttttaatgttctgtgctcttgtttttgaccctggccctttctgaagttgctttatcttaaaaagtagctacagtgttctagcagattccagaatataatgtagggggtagcgggatatttgtgttcttgtaatatatattatccttcctcggttctaggagaatagataaatatatttttttaggatatagaatgatactacaggtctcatgttggctgggtggctgcgtgagtgagttttcgtgcggctgagtaagctgttgccctcttctcttgccctgctcctggtgccttctcgagatcgagctggagtgactgagggtacctgactctaacctcactgtgccttctgccgggggctctgcccaggagcctctgggtttgctttctccaggctctctagatgcacgatccaatacagtgacctcctgtggctgtatcaatcagttcacttgactatgtgattggaaatcattcctctgttgcactggccacacaatttaagtgcctagtcaccatccaccgagcacagagattgaggctggtttagcaggttacggttcagttttgcttgtctccccgggcaagagaaggggacttaggaggaaggtgatgaggtcccagggactcctgtcacccaggactctccctcttacagaggaaagacctagtagcttaaaaggtctgggctgtgtgggggtggggcggtcataccactccctcaaccatgccctatgcctgtaagcccccatcaccacctccgtgcagggtcctagctggctgggtcctcttctagccttgtgcctgctccttttctgtatcccttactctgttgtctgttactgatttttttgataaaaagataataaaacctggtactttctaaaaaaaaaa

SEQ ID NO: 30 - DNA, 2025 bp, Rattus norvegicus
  Genbank Accession No. NM_012656
tctgctgcctgcccaactgcctgcctgcctgtgccgagagttcccagcaccatgagggcctggatcttctttctcctttgcctggccgggagggccctggcagcgcctcagacggaagctgcagaagagatggtggcggaggaaaccgtggtggaggagacagggttacctgtgggtgccaacccagtccaggtggaaatgggagagtttgaagaaggtgcagaggaaactgtcgaggaggtggtggctgaaaacccctgccagaaccatcattgcaaacatggcaaggtgtgtgagctggacgagagcaacacccccatgtgtgtgtgccaggaccccaccagctgcccagctcccattggcgagtttgaaaaggtgtgcagcaatgacaacaagaccttcgactcttcctgccacttctttgcgaccaagtgcaccctggagggcaccaagaagggccacaagctccacctggactacatcggaccatgcaaatacattgccccctgcctggattctgagctgaccgaattccctctgcgcatgcgtgactggctcaaaaacgtcctggtcaccttgtacgagagagatgagggcaacaacctcctcactgagaagcagaaactgcgtgtgaagaagatccacgagaacgagaagcgcctggaggctggagaccaccctgtggagctgctggcccgagactttgagaagaactacaacatgtacatcttccctgtccactggcagtttggccagctggatcagcacccgattgatgggtacctgtcccacacggagctggccccactgcgcgctcccctcattcccatggaacattgcaccactcgcttctttgagacctgtgacctagacaatgacaagtacattgccctggaggaatgggccggctgcttcggcatcaaggagcaggacatcaacaaggatctggtgatctaagttcaagcctcctgcagcagtcctggactctctccccctgatgtccccacccacttccactacccccttgtttaaaatgtttggatggttggctgttctgcctggggataaggtgctaacatagatttaactgaatacattaacggtgctaaaaaaaaacaaaaaacaaaaaaaacagaaagaaagaaaccagatcccaagtcacagcattttcccacgttactcgactctgaggccatagcctatccacagcctcctcgtcccctgcaccgcccagtgtctcactggctgtgttggaaacgggaattgcataagcttgccttcctcaagcaagaaatatctctagctttcatttccattttgactcttaacactcacccagactctgtgcttatttcatttgggggggggtgtgggcttcctggggtcttcccctggtagtttggaggtaggcagagggaagttacagacacagatacaaaacttgggcaaggacgctgtgaggccagtcagaaccagatggcaagtcttggtagcctaggtcaacgactgacagaataatccagagctctgatgcacaaaacagactcccagcagcccgggaccttgctgtctcctccactcttcaggcagtttctttccatgtttggctgttggttttaattttggtgagccaaggggaggcatgggcagaccaatacctcactagggattctcttactcaactgctatagggctttcaggctcttgctgggagctctaggcactgggctacaggaaagtgagactcaagaggaagacagagaaggttgtaacgtagagagagtgagtcataaagtttcaagcatgccccccccacctctccccaccctttgccagttgaaacttactaatcaagagaaacttccaagccaacggaaggaatggtcggatcccacaggctgagaatttgttcccctccaagcatttcatgaaaaagctgcttctcattaaccatgcgaactctcacagtgatgtgaagagcttgacagatctttcaaaataaaaagtaatgacttagaaatggcc

SEQ ID NO: 31 - DNA, 900 bp, Rattus norvegicus
  Genbank Accession No. NM_012678
cgcgagcccagtggagcgagtgagctatggccggcctcaactcactggaggcggtgaagcgcaagatccaggccctgcagcagcaggcggacgacgcagaggaccgtgcgcagggcctgcagcgcgagctggatggcgagcgcgaacggcgcgagaaagctgaaggagatgcggccgctctcaaccgtcgcatccagctggtggaggaagagctggaccgggctcaggagcgactggccacagccctgcagaagctggaggaggcagagaaggctgctgacgagagtgagagaggcatgaaggtgatagagaaccgagccatgaaagacgaggagaagatggagatccaggagatgcagctcaaagaagccaagcacatcgctgaggaggctgaccggaagtatgaggaggttgctcgtaagttggtcatcctggagggtgagctggagagagcagaggagcgggcggaggtgtctgaactaaagagtagcgacctggaagaggagctcaagaacgtaactaacaatctgaaatcactggaggctgcttctgaaaagtactctgaaaaggaggataaatatgaagaagaaatcaagcttctgtctgacaaactgaaagaggctgagacccgagctgagtttgcggaaaggacagtttctaaactggagaagacaatcgatgacctggaagaaaaacttgcccaggccaaagaagagaacgtgggcttgcatcagacactggaccagacactaaacgaacttaactgtatataaaccaaaccagaagagtcctgtcttgataccaactccactccagagagtgcaccctgtcttcctctcttataagaagttccgcttactaccatgtctccaccttgctggaaaggccaagcagaaaaat

SEQ ID NO: 32 - DNA, 5573 bp, Rattus norvegicus
  Genbank Accession No. NM_012680
cgcgggagcagttctctaccaccgccctgcccaccatggccaaaccaactagcaaagattcaggtttgaaggagaagttcaagatactattaggactgggaacgtcaaggccaaatcctaggtgtgcagaaggcaaacagacggagtttatcatcacagcggaaatcttgagagaactgagtggtgaatgcggcctcaacaatcgaatccggatgatagggcagatctgtgatgtggcaaaaactaagaaacttgaagagcatgcagtggaggcactttggaaggctgtctcagacttgctacagccagagcggccaccggaggcccgacatgcagttctggccttgttgaaggccattgtgcagggacagggtgatcgtttgggggttctccgagccctcttcttcaaagtgatcaaggactatccttccaacgaagacctccatgaaaggctagaggtttttaaggccctcacagacaatggaaggcatattacctacttggaagaagaactggcagagtttgtcctgcagtggatggatgttggcttgtcctcagaattccttctggtactcgtgaacctggtcaagttcaacagctgctaccttgacgaatacattgcgccaatggttcacatgatttgtctgttatgtatccggacagtgtcctctgtggacatcgaggtgtccttgcaagtgctggatgctgtggtctgctacaactgcctgcctgctgagagcctgcctctgttcattatcaccctgtgccgcaccgtcaacgtcaaggagctgtgtgagccgtgctggaagctgatgcgaaaccttctaggtacccatctaggccacagtgccatttacaacatgtgccgtatcatggagaacagatcctacatggaagacgcccccttgttgaggggagccgtgttctttgttgggatggcgctctggggagctcaccgactctattcgctcaagaactcccccacatctgtgctgccgtctttttatgaggccatgacctgtcccaatgaggtggtgtcatatgagattgttctgtccataacaagactcatcaagaagtacaggaaggagctccaggctgtgacatgggacattctgctggacattattgaacgactgctccagcaactccagaacctggacagcccggaactcaggaccattgtccatgacctgctgaccactgtggaggagctgtgtgaccagaacgagttccacggatcgcaagaaagatactatgaactggtggagagctatgcagaccagaggcctgaatcctctctcttaaacctgataacctacagagcccagtctatccacccagccaaggatggctggatccagaacctgcagttgttgatggagaggttcttcaggaacgagtgccgcagtgccgtgcgcatcaaggtgctggacgtgctgtccttcgtgctcctcatcaacaggcagttctacgaggaggagctgattaactcggtggtcatctcacagctctcccacatccccgaggataaagaccatcaggttcgaaagctggctacccagctgctggtggacctggcagagggctgccacacccaccacttcaacagtctgttggacatcattgaaaaggtgatggctcgctccctttctccacccctggagctggaggaaagggatctggctgtgtactcggcctccctggaggatgtgaagacggcagtcctcgggctcctggtcatccttcagaccaagctgtataccttgcccgccagccatgccacacgagtgtatgagacactcattagccacatccagctccattacaagcatggctactccttgcccattgctagcagcatccggctgcaggcctttgacttcctgctgctactgcgggctgactcgctgcatcgactgggcctgcccaacaaggatggggtcgtgcgattcagcccttactgcctctgtgactgcgcggaactggacagggcctcagagaagaaagccagcggacccctttcaccgccaactgggccccccagccctgtgccaacgggccctgctgtgaggctcggccacctgccctactccctgcttttccgtgtcctgctgcagtgtttgaagcaggagaccgactggaaggtgctgaagctggtgctcagcaaactccctgagtcgctgcgctacaaagtcctcattttcacctccccctgcagtgttgaccagctgtcttctgctctctgctccatgctttcagccccgaagacccttgagcggctccgaggcaccccagaaggcttctccagaactgacttgcacttggctgtggtccctgtactgacagcgttaatatcttaccacaactatttggataagactagacagcgtgagatggtttactgcctagaacaaggccttatctaccgctgtgccagccagtgtgtggtagccttggccatctgcagtgtggagatgcccgacatcatcatcaaggcgctccctgtcctggtggtgaagctgacacacatctctgctacagctagcatggccatccccctcctggagttcctgtctaccttggccaggctgcctcacctctacaggaacttcgccgcagagcagtatgcaagtgtgtttgccatctccttgccctacaccaacccctccaagttcaaccagtacattgtgtgtctggcccatcacgtcatagccatgtggttcattaggtgccgactgccctttcggaaggattttgtcccttatatcactaagggtctgcgttccaatgtcctcctgtcctttgatgatacccctgagaaggacagtttcagagcacggagcaccagtcttaatgagagacccaaaagtttgaggatagccagagcccccaaacaaggcctgaataactctccacctgtgaaagaattcaaagagagctgtgcagccgaggccttccggtgccgcagcatcagtgtatctgaacatgtggtccgcagcagaatacagacatctcttaccagtgccagcttggggtctgcggatgagaactctatggcccaggctgatgacaacctgaagaatctccacttggaactcacagaaacatgtctggacatgatggcccgatatgtgttctccaacttcactgcggttcccaagaggtcccctgtgggagaattcctcctggcagggggcaggaccaaaacgtggctggttggaaataagctggtcactgtgacaacgagtgtgggaactggtacgcggtcgttgctgggcctggactccggggatctgcagggtggctcagcatcaagctctgatcctggcacacatgtgaggcagacaaaggaagcaccggccaaactggagtcccaggctgggcagcaggtgtcccgtggggcccgggaccgagtccgctccatgtcagggggccacggccttcgagttggtgtcctggacacttcagctccctacaccccaggaggccctgcttctctgggagcacaggcagcaccagcagcaaggcctgagaagccctgtgcaggagcccaacttccggcagcggagaaggcgaacctggcagcctatgtgcctttgctgacccagggctgggcagagatcctggtccgcaggcccacaggaaacaccagctggctgatgagcttggagaacccgctcagccccttttcctcagacatcaacaacatgcccctgcaagagctgtctaatgcccttatggctgctgagcgcttcaaggagcaccgggacacggccctatacaagtcattgtcagtgccagcggctggcacagccaagcctcctactctcccacgttctaacacagtggcttctttctcctccctgtaccagcccagctgccaaggacagctgcacaggagcgtttcctgggcagactcggccgtggttcttgaggagggaagtccaggagaggctcatgtgccagtggagccccccgaattggaggactttgaggcagcattaggtacagacaggcactgccagcggcctgacgcctacagcaggtcttcctcagcatctagccaggaagaaaagtcccacttggaggagctggctgcagggggtatccccattgagcgggccatctcctctgagggggctcggcctacagtggacctgtccttccaaccctcacagcctttgagcaagtctagctcttctcctgagttacagaccttacaggacatccttggagacctaggggacaagactgacattggacggctgagtcctgaggctaaggtccgatcccagtcggggatcctggatggggaagcagctacctggtcagctccgggtgaagagagccgtatcacagtcccacctgaaggtcccctgccttccagttctccccgctcccctagtggcctccggccccgaggctataccatctctgattcagctccatcacgaaggggaaagagggtagaaagggacaacttcaagagcagaactgcggcctccagtgctgaaaaggtgccaggcatcaaccctagctttgtgttcctacagctctaccattcacccttttttggtgatgagtccaataagcccatcctgttgcccaacgagtcctttgaacggtcagtgcagctccttgaccagatcccatcctatgacactcacaagattgctgtcctgtatgtgggagaaggccagagcagcagtgagctggccatcctatcaaatgagcatggctcttataggtacacagagtttctgacaggcctgggtcggcttattgagctgaaggactgccaaccagacaaggtgtacttaggtggactggatgtgtgtggcgaggatggacagttcacgtactgctggcatgatgacatcatgcaagctgttttccacattgctaccctgatgcccaccaaggatgtggacaagcaccgttgtgacaagaaacggcacctgggcaatgactttgtttctatcatctacaatgattctggtgaggacttcaagctgggcaccattaagggccagttcaacttcgtccatgtgatcatcacaccgctggactataaatgcaacctgttgaccctgcagtgcaggaaagacatggagggccttgtggacaccagtgtggccaagattgtgtctgaccgcaacctgtcctttgtggcccgacagatggccctgcatgcaaatatggcctcacaggtacaccacagccgatccaaccccacggacatctatccctccaagtggatcgcaagactccgccacattaagcgtctccgtcagcggatccgtgaagaagtgcactattcaaacccaagcttgcctctgatgcaccctccagcccataccaaagtcccagctcaagcccctacggaggctacacccacctacgagacaggccagcggaaacgcctcatttcctctgtggatgacttcacagagtttgtgtgaggccaccagagccacaactggagtcccgtggccatgcacctggcccttccctgaatgacacctcctgactgtactcttacatgaaataaaactgcccgtgcccatctg

SEQ ID NO: 33 - DNA, 2400 bp, Rattus norvegicus
  Genbank Accession No. NM_012736
ggtgaggccgactgactccgttctagctggaggttcctgacttccctgctcgccgacccctggcgtgtgacgaccgatctcaggctgagcaatggcgtttcaaaaggtagtgaaagggactattcttatgggtggaggagctctggccactgttttgggactctctcagtttgctcactacagaaggaagcaagtaagcctggcgtatgtggaagcagcaacatgcttctcagagcccgtgaacagggagcctccttccagagaagctcagctcatgactctgcagaacacatcggaatttgacatcctcgtcattggaggaggagccacaggatgtggctgtgcgctagacgccgtcaccagaggactgaaaacagcccttgtagagagaaatgacttcgcatcagggactagcagcagaagcactaaattgatccatggtggcgtacgatacctccagaaggctatcacgaacttggatgttgaacagtataggatggtgaaagaggcccttcatgaacgtgccaacttactagaaatcgctccccatctatcagctccgctgcctataatgctgccactttataagtggtggcagttaccttattactgggtgggaatcaagatgtatgatctggttgcaggaagtcattgcctgaagagcagttatgtcctcagtaaatccagagcccttgagcatttccccatgctccagaaggacaagctggtcggagccattgtctactatgatggacagcacaatgacgcccggatgaacctcgccatcgccctcaccgctgccaggtacggggctgccacggccaattacatggaggtggtgagcttgctcaagaagacagaccccgaaactgggaaagagcgcgtgagtggtgcccggtgcaaggacgtgctcacagggcatgagtttaacgtgagagctaaatgcgttatcaatgccaccggccctttcacagactccgtgcgcaaaatggatgataacgatgttgttcccatctgccagcccagtgcaggggttcacattgtgatgcccgggtactacagccccgagaacatgggacttcttgatcctgcaaccagtgatggcagagttattttcttcttgccttgggagaagatgacaattgcgggtaccactgattcgccaacggacgtcacgcaccatcctattccttcggaagacgacattaacttcatcttaaatgaagtgcggaactacctgagttgcgacgttgaagtgagaagaggggatgtcctggcagcgtggagtggcattcgcccgcttgttaccgatcccaagtctgcaaacactcagtccatctctcgaaatcatgttgtggaagtcagcgacagtggcctcatcacaatagcaggtgggaagtggaccacatatcgctccatggcagaagatactgtgaacaaagctgtcaagcttcacaacttgaatgcaggacccagtaggaccgttgggctcttccttcaaggaggcaaagattggagccccacactctacatcaggcttgtccaggactatgggcttgagagtgaggttgcacaacacctggccaaaacctatggtgacaaggctttcgacgtggccaaaatggcaagtgtgactggaaaacggtggcctgttgttggagtgcgtcttgtgtcagaatttccgtacatcgaagcagaggtgaaatatgggattaaggagtacgcatgcaccgctgttgacatgatttcacgtcgcacccgcctggcctttcttaatgttcaggctgcagaggaagccctgcccaagattgttgagttaatgggaagagaattgaactggagtgaattgaggaaacaggaagaacttgaaacagccacgaggtttctgtactatgaaatgggctataagtctcgaacagaacaactcacagatagtactgaaatcagcctgctgcctccagacatcgatcggtacaagaagagatttcacatgtttgatgaagacgaaaaaggcttcattaccattgttgatgttcaacgtgtgctagagagtatcaatgtacaaatggacgaagacacactacatgaaattctctgtgaagtagacttgaacaagaatggtcaggttgagctccatgagtttctgcagctgatgagcgcagttcatacaggaagggtgtctggaagccggcttgccatcctcatgaagactgccgaggagaacttggaccgtagagttccaatccccgtggatcgtagttgtggaggattgtgagtctgaccaataaatccacaaccaacaagcctaggacagtcagcactatgtacaaccagagacgacttaaaccactctaaaatagtggccattgtagctgcctttttttttttttttttttaaaa

SEQ ID NO: 34 - DNA, 2924 bp, Rattus norvegicus
  Genbank Accession No. NM_012747
atggctcagtggaaccagctccagcagctggacacgcgctacctggagcagcttcatcagctgtacagcgatagcttccccatggagctgcggcagttcctggcgccttggattgagagccaagattgggcatatgcagccagcaaagagtcacacgccactctggtgtttcataacctcttgggcgagatcgaccagcagtatagccgattcctgcaggagtccaatgtcctctatcagcacaacctgcgaagaatcaagcagttcctgcagagcaggtatcttgagaagccaatggaaattgcccggattgtggcccgatgcctgtgggaagagtctcgcctcctccagacggcagccacggcagcccagcaagggggccaggccaaccaccccacagctgccgtagtgacggagaagcagcagatgctggaacagcatcttcaggatgtccggaagcgtgtgcaggatctagaacagaaaatgaaagtggtggagaatctccaggatgactttgatttcaactataaaaccctcaagagtcaaggagacatgcaggatctgaatggaaacaaccagtctgtgaccagacagaagatgcagcagctggagcagatgctcacggccctggaccagatgcggaggagcatcgtgagcgagctggcagggctcttgtcagcaatggagtacgtgcagaagacactgaccgatgaagagctggctgactggaagaggcggcagcagatagcgtgcatcggaggccctcccaacatctgcctggaccgtctggaaaactggataacttcattagcagaatctcaacttcagacccgccaacaaattaagaaactggaggagctgcagcagaaagtgtcctacaagggggaccctattgtgcagcaccggccaatgctggaggagaggatcgtggatctgttcagaaacttaatgaagagtgccttcgtggtggagcggcagccctgtatgcccatgcacccggaccggcccttagtcatcaagactggtgtccagtttaccacaaaagtcaggttgctggtcaaatttcctgagttgaattatcagcttaaaattaaagtgtgcattgataaggactctggggatgtcgctgccctcagagggtctcggaaatttaacattctgggcacgaacacaaaggtgatgaacatggaggagtccaacaacggtagcctgtctgcagagttcaagcacctgaccctgagggagcagagatgtgggaatgggggccgtgccaattgtgatgcctccttgattgtcactgaggagctgcacctgatcacctttgagacagaggtgtaccaccaaggtctcaagatcgacctagagacccactccttgccagtcgtggtgatctccaacatctgtcagatgcctaatgcttgggcatcaatcctgtggtataacatgctgaccaataaccccaagaacgtgaacttcttcactaagcctccgattggaacctgggaccaagtggccgaggtgctgagctggcagttctcgtccaccaccaagcgagggctgagcatcgagcagctgaccaccctggccgagaagctcttagggcctggtgtgaactactcagggtgtcagatcacatgggctaagttttgcaaagaaaacatggccggcaagggcttctcgttctgggtctggctagacaatatcatcgaccttgtgaaaaagtatatcttggccctttggaatgaagggtacatcatgggtttcatcagcaaggagcgggagagggccatcctaagcacaaagcccccgggcaccttcctgctgcggttcagtgagagcagcaaggaaggaggggtcactttcacttgggtggaaaaggacatcagtggcaagacccagatccagtctgtagaaccatataccaagcagcagctgaacaacatgtcatttgctgaaatcatcatgggctataagatcatggacgctaccaacatcctggtatccccactggtctacctctaccctgacattcccaaggaggaggcattcggaaagtattgtcgccccgagagccaggagcaccctgaagctgacccaggtagtgctgccccttacctgaagaccaagttcatctgtgtgacaccaacgacctgcagcaataccattgacctgccgatgtccccccgcactttagattcattgatgcagtttggaaataacggtgaaggtgctgagccctcagcaggagggcagtttgagtcgctcacgtttgacatggatctgacctcggagtgtgctacctccccgatgtgaggagctgaaaggcaaagctacagagtatgactgagacactgcccatgtcaccttagcagcaactcagatcactgaactcactgtgtccagattttttctttaacctcctacttctgctgtctttgggcagtctgggtactttttaaaatagagaactgagtgagcgtgggtgatgcgctcttatgtgaggaggagggcacctcttgagtccgtgatggctgtgaaagcagagggctgggggggagcgaaaggaaacacctatgttctgtccgcctgtcctcctggtttgttgttgacaagcgcctcctggtgccatggcatcctgctgcccctttctgtgagctgataccccaggctgggactcccggctctgcactttcaacctggttaatgtccacatagaagctaggactaagcctataggcttctctttaagttaaaaaaaaaaaaaatactaagaattaaagggcaaaacacactgaaaacagcatagcctttccatatcaaagaaaactcgggtaacagccttttcggtgctttaagctgtcttaggctgatcatttatataaactctgcaatggttcaatcaatctgtaaagacagctgagaac

SEQ ID NO: 35 - DNA, 2142 bp, Rattus norvegicus
  Genbank Accession No. NM_012749
atggtgaaactcgcaaaggccggcaaaacccacggagagtccaagaaaatggctcctcctccaaaggaggtggaagaagatagtgaggatgaagaaatgtcagaagatgaagatgacagcagtggagaagaggaggttgtcatccctcagaagaaaggcaaaaaggctaccacaactccagcaaagaaggtggttgtttcacaaacaaaaaaggctgcagttcccacaccagctaagaaagcagctgttaccccaggcaaaaaggcagcagccacaccagccaagaaagctgttacaccagccaaagtagttccaacacctggtaaaaagggagctgcacaagcaaaagcattggtaccaactcctggtaaaaagggagctgtcactccagccaagggggctaagaatggtaagaatgccaagaaggaagacagcgatgaggatgaagatgaagaggatgaagatgacagcgatgaggatgaagatgaagaggatgaatttgagccaccggtagtaaaaggagtgaaaccagcaaaagcagctcctgctgctcctgcctcagaggatgaggatgaggaagatgatgatgatgaagatgatgatgatgatgatgaagaggaggaggaggaagatgactctgaggaagaagttatggagatcacaccagccaaaggaaagaaaactcctgcaaaagttgttcctgtgaaagccaagagtgtggccgaggaggaggaagatgatgaggatgatgaagatgaagaggaggatgaagatgaagaagatgaagaggacgatgaagatgaggatgaggaagaagaggaagaacctgttaaagcagcacctggaaaacggaagaaggagatgaccaagcagaaagaagcccctgaagccaagaaacagaaaatagaaggctcagaaccaactacacctttcaacctgttcattggaaaccttaatccaaacaagtctgttgctgaattaaaagttgccatcagtgaactttttgctaaaaatgatcttgctgctgtggatgtcagaactggtacaaataggaaatttggttatgttgattttgagtctgctgaagacctagaaaaggccctggagctcactggtttaaaagtgtttggcaatgaaattaaactagaaaaaccaaaaggaagagatagtaagaaagttcgagctgcaagaacacttttagccaaaaacctctctttcaacatcactgaggatgaattaaaagaagtgtttgaagatgctgtggagatcagattagtcagccaggatgggagaagtaaagggattgcttatattgaatttaagtctgaggctgatgcagagaaaaacttggaagaaaagcagggggcagaaattgatggacggtctgtttcactctactacactggagagaaaggacaaaggcaagagagaactggaaagaatagcacttggagtggtgaatcaaagactttggttttaagtaacctttcctacagtgcaacagaagaaacacttcaggaagtattcgagaaagcaacctttattaaagtgccccagaacccacatggcaaatctaaagggtatgcatttatagaatttgcttcatttgaagatgctaaagaagctttaaattcctgtaataaaatggaaattgagggcagaacaatcaggctggagttgcaaggacccaggggatcacctaatgcgagaagtcagccatccaaaactctgtttgtcaaaggtctgtctgaggataccactgaagagaccttaaaagaatcatttgagggctctgttcgtgcaagaatagtaactgatcgggaaactggttcttctaaagggtttggttttgtagactttaatagtgaggaagatgccaaagctgccaaggaggccatggaagatggagaaattgatggaaacaaagttaccttggactgggccaaacctaagggtgaaggtggctttggtggtcgaggtggaggcagaggaggtttcggaggcagaggtggtggcagaggcggaagaggcggatttggcggaagaggccggggagggtttggaggcagaggaggcttccgaggcggcagaggaggcgggggagacttcaagccacaaggaaagaagacgaagtttgaatag

SEQ ID NO: 36 - DNA, 2506 bp, Rattus norvegicus
  Genbank Accession No. NM_012751
cttgggttgtggcagtgagtcccaccagacccgccctttgcacaccacttccgaaggccggggtcttctgcccgccaggccgggacactataccctattcatttttttattgcagtgcctgagtcttcttttaaaacaagatgccgtcgggtttccagcagatcggctctgaagatggggaaccccctcagcagcgagtgactgggacactggtccttgctgtattctcagctgtgcttggctcccttcagtttggctataacattggagtcatcaacgccccacagaaagtgattgaacagagctacaatgcaacttggctgggtaggcagggtcctgggggaccggactccatcccacaaggcaccctcactaccctttgggctctctccgtggccatcttctctgtgggtggcatgatttcctcctttctcattggcatcatttctcaatggttgggaaggaaaagggctatgctggccaacaatgtcttggctgtgctggggggcgccctcatgggcctagccaatgccgcggcctcctatgagatactcattctcggacggttcctcattggcgcctactcagggctaacatcagggttggtgcctatgtatgtgggagaaatcgcccccactcatcttcggggtgccttgggaacactcaaccaattggccatcgtcattggcattctggttgcccaggtgttgggtttggagtctatgctgggcacagctaccctgtggccattgcttctggctatcacagtactccctgctctcctgcagctgcttctgttgcccttctgtcctgagagcccccgatacctctacatcatccggaacctggaggggcctgcccgaaagagtctaaagcgcctgacaggctgggctgatgtgtctgatgcactggctgagctgaaggatgagaaacggaagttggaaagagagcgtccactgtccttgctgcagctcctgggcagccgcacccaccggcagcctctgattattgcagtggtgctgcagctgagccagcagctctcaggcatcaatgctgttttctactattcaaccagcatctttgagttagctggggtggaacagccagcctacgccaccataggagctggtgtggtcaataccgtcttcacgttggtctcggtgctcttagtagagcgagctgggcgacggacactccatctcctgggcctggcaggcatgtgtggctgtgccatcttgatgacggtggctctgctgctgctggagcgggttccatccatgagttatgtgtccatcgtggccatatttggctttgtggccttctttgagattggtcctggccccatcccctggttcattgtggccgagctcttcagccagggcccccgcccagcagccatggctgtagctggtttctccaactggacctgtaacttcatcgttggcatgggtttccagtatgttgcggatgctatgggtccctacgtcttccttctatttgccgtcctcctgcttggcttcttcatcttcaccttcctaagagtgcctgaaaccagaggccggacatttgaccagatctcggccaccttccgacggacaccttctctcttagagcaggaggtgaaacccagtacagaacttgaatacttagggccagatgagaatgactgaggggcaaaatggtgggagagccaccctccccaccagactccctcctttcctcgcagcactttagccctctcttcccttacctccaggatgaaggaaacagcagcctggggaactgggaagctggagggaggggcgggtcacatacccctcattccctctgtgtgattcttttggattatttatgtgttgtggctaggctgtggccacctagatgggcttttctcccgtcctgccttcctcttacccctatccagagactcagctctagaatacttctgttccctttaagagaaggggtctgctggagggtgaagctgccctgagttcagggggatgagaagcaggggggctgtgagtgagtgctttcctactatgactcctcccacaaactggcgctttcactgaactcttgccacatagactctgggtgaagggggttgtcttgacccctccagggcaaaggatacaccctcccaaaatctagccttgcctcgctgctgtaggctccaccctccagggcaaaggaacacaacagtacatccctgacagggcaaggatggtagagcacatcagtctccatttggggccctggcctgttccccagggctgccaagtgtgggtaccaacactttcttgttcccctccaggaagggtgctaaacccgaaagcttctgaccaactaaggcaggaggggatttgaaaggctgcctataaacactggttgggagggagcctttggtatttttgtatgtacgatagggagcagaaacctgggggctggtgtattaaatatgtatatagagattcatccataaagtcactgtatggagacaagt

SEQ ID NO: 37 - DNA, 8810 bp, Rattus norvegicus
  Genbank Accession No. NM_012756
agcttcgactcgctgttgcggcgcgatcgagacccaggcgcggctcggaacggccagccgccgtgagccccacgccacacgcgatgcgggccgttctgccgggacccgtgcctccggggccgcgcgtcgcgctcctgctgccgctcctgctgctgctgctcgtggcggccgcgggctccgcgcagggccaggccgtggacttggacgccttgtgcagttacacatgggaagctgttgattccaaaaataatgcagtttataaaatcaacccctgtggacatgtggataatcccaggtgtgggccgacaagtgctgtctgtatgtgtgacctaaagtcagaaaactgccggtcagtgggtgactcacttttgagaagttcagccaaatcactcctggaatttaacaccactacgggctgccagccttcagagcacagaatccagactagcattacatttctgtgtgggaagaccctgggaactcctgaatttgtaactgccacagactgtgtgcattacttcgaatggaggactactgcagcctgcaagaaagacatatttaaagctgataaggaggtgccatgctatgtatttgatgacaagttacagaagcatgatttgaacccactgatcaagctgaatggcggctacctggtggatgactctgacgctgacgcatctctgttcatcaatgtgtgtagagacatagactcccttcgggaccccagcacacagctgagagtctgccctgctggcactgctgcctgtctgctgaaggggaaccaggcatttgatgttggccggcccaaggaggggctgaagctattgagcaaggacaggctcgttctgacttatgttaaggaagaaggagaaaagccagacttctgtaatggtcacagccctgcagtgacagtaacatttgtgtgcccatctgagcggagagagggcaccattcctaaactcactgccaactgtcgctatgaagttgagtggatcactgagtatgccagccacagagattacttggagagtgaaacctgctccctcagcagtgagcagcatgatattgctattgaccttagtcccttggcccagcatgaagaagggtccccctatgtagctgatggaggagaatataggttttttatgaatgtctgtggggacacaaaggtctcactctgtaacaaagaggctgctgtttgtcaagagaaaaaggtggattccactcaagtcaaaatagcaggaagacaccagaaccagacactccggtactcagatggagatctcaccctaatctattctggaggtgatgagtgtagttccggcttccagcggatgagtgtcataaactttgagtgcaacaaaaccgcaggtcaagatgggagaggagagcctgtgttcacaatcgaggtggactgcacatacttcttcacgtgggacactaaatatgcctgtgtaaaagagaaggaagatctcctctgcggggccatcgacggcaagaaacgttacgacctgtctgtgctggctcgtcactcagaatcagaacagaattgggaagcagtggatggcagccaggctgagtcagaaaagaggaatttcttcatcaatgtctgtcaccgggtgctgcaggcgggaaaggccaagaactgtcctgaaggtgctgccgtgtgtgctgtggataagagtggaagtaaaaatctaggaaaatttgtctcttctcctacaaaagagaaaggacacattcagctctcttactctgatggcgatgactgtggtaatgataagaaaataacaactaacatcacatttgtgtgcaaaccaggtgatctggaaagtgctccagtgctgagagctgcagggcccgatggctgctcctatgagtttgagtggcacacagctgctgcctgtgtcctgtcgcagacggagggagaaaactgcactgtccttgatgctcaggcagggttttcttttgatttgtcactcctcacaaagaagaatggtgcatataaagttgagacagacaagtatgacttctacataaatgtttgtggccctgtatccgtgaacctgtgtcagtcaaactcaggagcctgccaggtagcaaaaagtggtaagtcttggaacttggggctgagtaatactaagcttacgtactatgatgggatgatccagctgagctacaggaatggcacgctgtataacaatgaaaagcacacaccgagatccacactgattaccttcctctgtgaccgtgatgctggagtgggcttcccagaatatcaggaagaggacaactctacctacaacttccggtggtacaccagttatgcttgcccggaagagcccctggagtgcatggtgacagacccctccatgatggagcaatatgacctctccagtctagtgaagtttgaaggtggccgtggaggaaactggtatgccatggaaaactcccgagaacatttcacacggaggaaatactacctcaacgtgtgccggcctctaaatcctgtgccaggctgtgatcgatatgcatctgcttgccagagtaaatacgaaaacaatgagggctccttggcagagactgtggccatcagtaacttgggagttgcaaagacaggccctgtggtggaggagagcggcagcctcctcttagagtatgtgaacggctctgcgtgcaccaccagtgatggccggctaaccacctacagcaccaggatccatcttgtgtgtggtcgaggaactatgaattcccatcccatattcactttcaactgggaatgtgtggtcagtttcttgtggaacacggaggctgcctgccccatccagacgatcacagattcagaccaggcttgctctataagggaccccaacagcggatttgtgtttaatctgagcccacttaactattctcaaggacacatggtcttaggcattgggaagacttttgtgttcaatatctgtggtacaatgcctgcctgtggaacggttgcagggaagccagcccttggctgtgaggcagaaactaagatcaaagacattaaggatctgaagccagaaaggccagtcgggatggagaagagcctccagttgtctgccgaggggttcctcactctgacctacaaaggctcttctccttctgacagaggcacagccttcatcatccgtttcatttgcaatggtgacatttacccagggacccccaagttcctgcatcaggacattgactctgcacgagggatccggaacaccttctttgagtttgaaactgcattggcttgtattccttctgtagtggattgtcaagtgactgacccagctgggaacgagtacgacctgagtgccctgagcatggtcaggaagccgtggactgctgtggacacgtctgtgcatgggaagaagaggcgcttctatctgagcgtgtgcaccccactgccttacattcctggctgcgatggcattgcaatggggtcctgcatggtgtcagaagacaaaagtcagaacttgggtgtggtgcagatcagtcctcaagctactggaaacggatctctcagcatcctgtatgtgaatggggataggtgtggaaaccagcgctactccaccaggatagtgttcgaatgtgcccagacgtcgggctcacctatgttccagctcctgaacaactgtgagtatgtgtttgtgtggcgaacagtggaggcctgccctgtggtcagagaggaaggagacaactgccaggtgaaagaccccagacacggcaatttgtatgacctgaagcccctggccctcaatgacaccatcatcagtgctggcgagtacacctactacttccgggtctgtggaaagctgtccttagatgtgtgctctgcccatgatgggtccaaggcagtctcatcatgccaggaaaagaaaggaccacaaggattccagaaagtggcagggctccttaatcagaagctgactttcgaaaatggactgttgaaaatgaactacagtgggggggacacctgccataaggtgtatcagcgctccacaaccatctatttctactgtgaccggacgactcagaagccagtgtttctgaaggaaactttggactgctcctatttgtttgagtggcgaacacagtatgcctgcccacctttcaatgtgacagagtgctctatccaggatgaggctggcaactccattgacctctcctcactgtcaagatacagtgacaactgggaggctgtgaccaggacaggggccactgagcattacctcatcaacgtatgcaagtctctgtctccacaggctggcacagatccatgccctccagaggcagctgtttgtctgctggatggctccaagcctgtgaacctcggcagggtgagggatggtcctcagtggacagctggtgtgactgtcctgaagtatgtggatggtgacttgtgccccgacaaaattcggaaaaggtcaaccattattcgcttcacctgcagtgacagccaagtgaactccaggcctctgttcatcagtgctgtacaggactgtgagtacacattttcctggcccacacctgctgcctgtcctgtgaagagcaacatacacgatgactgccaagtcaccaaccccagcacaggccacctgtttgacctgagctccctaagtggcaaagctggcatcacagcctcctacagcgagaaggggatggtcttcatgagcatctgtgaggagaatgtgaactgtagccctggagtaggggcctgctttggacagaccaggatcagtgtgggccaggccagcaagaggctgagctacaaggatcaggtcttgcagctggtgtatgagaatgggtccccatgcccctccaagtcaggcctgaggtacaagagtgtcatcagcttcgtgtgccggccggaggctggacccaccaacaggcccatgctcatctccttggacaagcagtcgtgtacactcttcttctcctggcacacgcccctggcctgtgagcaggcgacggaatgcaccgtgcggaatggaagctcgattattgacctgtcacctctcatccaccgcactggtggttatgaagcatacgatgagagtgaggacgacacctctgataccacccctgacttctacatcaacatctgtcagccactgaatcccatgcatggagtgccctgccctgcaggcgcctcagtatgcaaagtccccgtggacgggccccctatagatattgggagagtcacaggccctccaatattcaatcccgtggccaatgaggtctacctgaactttgagagcagcactccttgcttagcggacaaatatatgaactacacctcactaattgcgtttcactgcaggagagggatcagcatgggaactcctaagctgataaggaacaatgactgtgactttgtgtttgagtgggagactccgattgtctgtcctgacgaagtgaagacacagggctgtgctgtaacagatgagcagctgctctatagcttcaacctgacgagcctttccacaagcactttcaaagtcactcgggacgctcacacatacagtataggggtgtgcacaacggcagctgacttagaccaggaaggctgcaaggacggcggggtctgtctgctctctgggagcaaaggagcttcttttgggcgcctagcgtcgatgcagctggattacaggcaccaggatgaagcagtcatcctgagttatgtgaacggtgatccttgccctccagaaacggaagatggcgagccctgtgtcttccccttcatttacaaaggggagacctatgacgaatgtgtattagagggacgagcgaaactgtggtgtagcaaaactgcgaattacgatcgtgaccacgagtggggcttctgcagaccgagcaacagtcaccggatgtctgcgatcatatttacttgtgatgagaacgaagatattgggaggccagaagtgttcagtgaagatcgtgggtgtgaggtgacatttgagtggaaaacaaaagttgtctgccctccgaagaagatggagtgcaagtttgttcagaagcataaaacctatgacttgcgattgctctcatccctcacggggtcctgggattttgtgcatgaaggaaactcgtactttatcaatctgtgccaaagagtatataaaggtcccctggactgctctgagagagccagcatttgcaagaagagtgccactggtcaagtccaggttttggggcttgttcatactcaaaaactggaagtcatagatgaaacagtccttgtcacttactcaaaaggccattcttgtggtgggaataagactgcatcctcagtgatcgagttgacctgtgcaaagactgtgggcaggcctgcattcaagaggtttgatattgacagctgcacctactacttttactggtactcacgggctgcctgtgctgtgagacctcaggaggtgaacatggtgaatggaactcttaccaaccctgtgactggcaagagcttcagcctcggggaaatttattttaagctgttcagcgcctctggggacatgagaagcaatggggacaactatctgtatgagatccagctctcctctatctccagctcttctaaccctgcgtgctccggtgccaacatctgccaggtgaagcccaatgaccagcacttcagcaggaaagtgggcacctctgacatgaccaagtactacgtccaagacggtgatctggatgtggtgtttacctcttcctccacgtgtggcaaagataagaccaagtctgtgtcttccaccatcttcttccactgtgaccctctgctgaaggacggggtccccgagttcagccacgagactgctgactgccagtaccttttctcctggtacacttcagctgtgtgtcctctgggtgtggactttgatgatgagaatgctgtgccagagtataaagggctctcagagcggagtcaggccgttggggcagtcctcagtctcctcctggtggcactgactggctgtctgctggccttgctgcttcataagaaggagagaagggaaactgtgataaacaagctgaccaattgctgcagaaggagctcgggggtgtcctataagtactcaaaggtcagcaaggaggaggagacagatgagaatgagacagaatggctgatggaagagatccaggtgccagcccccagactaggcaaggacgggcaggagaacggccacattaccaccaagacggtgaaagcagaagctctcacttccctgcatggggatgaccaagacagtgaggatgaggtcctgaccatcccagaggtgaaagttcacacaggcagaggagccgaggtggaaagctcacagcccctgagaaatccccagcgcaaggtcctgaaggaaagggagggggagaggatggggctggtccgcggtgagaaggccagaagagggaagttcagacccggacagcgcaagccaacaacccctgccaagctggtgtccttccatgatgacagtgacgaggacctcctacacatctgactccgtggtgcctacaggagaaggtggcaccatggacagccaagcatctccaaccaaataagacttcagctcgatgatgcgtctgtcattttgcctttaacaaaactgcttcaaagggaagtttctgtaatgggggagaggatgggggaggtgggcaccactcttccatgatcgtttacagtcagtggaacaaggtgttgcttgaatcggccaaagggcgctacttggtgcccagggttttgccccaagtcctcacttacgatcatagctgctgtgtgcttccaacaggtgcccaggccacatgcatctcacaacagagggctgtgtttgaaaaaaacccttgctgctttagaccctatagggtgaccatttatatttttagcattgtaattctctccccctatttattgactttgacaattactactcaggtttgcgaaaaaggaaaaaaaaaaaaaaaccagtttcttctgccagcaagggcataaggtgaagctggcattatgctggagccttgtacgtggctcctgagctggtccttgatgcacactttagtgagctgcagtattctattcttcgctttgcgttttgtaagggcacacatacatgcacaggtccccgagtgcctcggtttgggaaggcccgcctgctccgtgccctacctcgtctctatagctgcagctctttgcacgaatccttctgggtgtcgcttttgcccgctggtgagcgccagcagctcacccagaggtgggtgtttgtgcatgcgatggagtagaggctcttggagaggagccgcacttcaggtttgggctgtaggtctcatctcttcaggttctcaatgccacctttactgtgctttttgcttttattttaagggggaaatgtttatcacccattcaacctataagaagccttaatttgcacagggtgacttacagacaccgtgaaatacggtgggccagtgttgtgtgtgggcttgtgcagggcagtgtcccgggatggaaggccaggcccggtccactggctgtggactcctttcctgatgtgttcaatgacttctcacattatagagttgtatataggtggtatttacatacccagaagcaaagtaccccgcagaatttcttggtttatgcctgattttgctagcttatttgatttcacattgagtgtatttttaaaaattgatttttttcttcattttttaatcaactttactgtaatatgaagtattcaatttcaataaaaataaattattaaaaaaaaaaaaaaaaaaaaaaaaaaaaa

SEQ ID NO: 38 - DNA, 2683 bp, Rattus norvegicus
  Genbank Accession No. NM_012776
gaattcgggcgggcgacgagcgaggaccgggcggggcggcggcggcgccgaggccgacaagccgcgcgggccgggccgggccgagcgagcgggagcggagcggagcctcgggcggcgggaggaacagcgccgccgccgccaagatggccgacctggaggcggtactggccgatgtgagctacctgatggccatggagaagagcaaggccacgccggccgcgcgcgccagcaagaagatcctgctgccagagcccagcatccgcagcgtcatgcagaagtatctagaggatcgaggagaagtgacctttgaaaagatcttctcacagaagttaggatacctgcttttccgggacttctacctgaaccatctggaagaggccaagcccttggtggagttctatgaagagatcgagaaatatgagaagctggagacggaggaggaacgtgtggtccgcagccgggagatctttgactcctacatcatgaaagaactgctggcctgctcacatcccttttcaaagaatgccacggagcatgtccagggccacctggtgaagaagcaggtacctccagatctcttccagccatacattgaggagatttgtcagaacctccgaggggatgtgttccacaaattcattgagagtgacaagttcacacggttctgccagtggaagaatgtagagctcaacatccacctgaccatgaatgacttcagtgtgcatcgaatcatcgggcgtgggggcttcggtgaggtctatgggtgccggaaagcagacacaggcaagatgtacgccatgaagtgtctggacaagaaacgcatcaagatgaagcagggagagaccctggctctgaacgagcggatcatgctttccctcgtcagcactggggactgccccttcatcgtgtgcatgtcatatgcattccacacaccagacaagctcagtttcatcctggatctcatgaacggtggggacctgcactaccacttgtctcagcatggagtcttctctgaagccgacatgcgcttctacgcagctgagatcatcctgggccttgaacacatgcacaatcgctttgtagtctacagggacctaaagccagccaacattctcctggatgagcatggccatgtgagaatctcagacctgggcctagcctgtgacttctccaagaagaagcctcatgccagtgtgggcacacacgggtacatggccccggaagtcctacagaagggcgtggcctatgacagcagtgccgactggttctccctgggctgcatgctcttcaagttgttgcggggacacagccccttccggcagcacaagaccaaagacaagcatgagattgaccgcatgacattgacaatggctgttgagctgcctgactccttctcccctgaactccgatccctgctggaaggtttgctgcagagggatgtcaatcggagactaggctgtctgggccgtggggctcaagagataaaagaaagccccttcttccgttccctggactggcagatggtcttcttacagaagtaccctcctccactgatccccccacgcggggaggtgaatgcagcggacgcctttgacattggctcctttgatgaggaggacacaaaaggaatcaagttactggacagtgaccaggaactgtaccgcaacttccctctcaccatctctgagcggtggcaacaggaggtggcagagactgtctttgataccatcaatgctgagacagaccggctggaggcacggaagaaagccaaaaacaaacagctgggccacgaggaggactacgccctgggtaaggactgcatcatgcatggctacatgtccaagatgggcaaccccttcctgacccagtggcagcggcgatacttctacctgttccccaaccggcttgagtggaggggtgaagacgaggctccgcagagcctcctgaccatggaagagatccagtcggtggaagagacacagatcaaggaacgcaagtgtctcctgcttaagatccgaggtggcaagcagtttgtcctgcagtgtgatagtgaccctgagctggtgcaatggaaaaaagagctgcgcgatgcttaccgtgaggcccagcagctggtgcagcgagtgcccaagatgaagaacaagccacgctcacctgtggtggagctgagcaaggtgccactgattcagcgtggcagtgccaacggcctctgattcacccatctgctgcccgcctgcccacccgccttttataaacctctaatttattttgttgaatttttattatttgttttcgcaaagcggaaaaggttttattttgtaattattgtgatttcctgtggccccagccaggcccagccccagggaggggcctgcttgcctcagctcctgctgccaccaacccagccactgtctagcacccctgccccgcccccaccgcatgcccctagggtccttgctcccagtatcttcctactgggaagaggagcaaccctcagcagccctcttgcccctccatggggtgaagccacagtcggtgggtgtgtcacttcaggctctgtgggctacactcagcctgaggcccagctgggtggcccagcacccctaccctaggaaggtgcaacacagggatactacttgaactttcctatcatagctcccatgccacagagggacccgaattc

SEQ ID NO: 39 - DNA, 330 bp, Rattus norvegicus
  Genbank Accession No. NM_012786
gacattcagggtgcctctttggggccaaggaaagagtgcgaccccgagaatcatgccaaggcttccccctatcctgcggctgctccaagcgcccgagaagtacacagtgattcctaaagcccgtatctcttccaagccagccaaatctcccacttccgccatggatcaggctgtggggatgtcagtcatagtcgctggcttcatggttccagcaggatgggtcttatcccacttggagagctataagagaagctccgcagcatgaggagctcggcgcatccctgagaggccaattaaacgcttccagtacctccaaaaaaaaaaaaagaa

SEQ ID NO: 40 - DNA, 1258 bp, Rattus norvegicus
  Genbank Accession No. NM_012796
gggggaacgcgtcagacttggccaactgaggctgggctggacccctattgtggaatcgcggacacttcctacagttgtcgaacgcaatccgtctacaccaccttgtgtcactacctaccaccatgggtttggagctctacctggacctgctgtcgcagcccagccgcgcggtctacatcttcgccaagaagaatggcattccctttcagttgcgtaccgtggatttactcaaagggcagcacttgagcgagcaattctcccaggtgaactgcttaaagaaagtgcctgtcctcaaagacggaagcttcgtgttgaccgaaagcactgccatcttgatttacctgagttccaagtaccaggtggcagaccactggtacccggccgacctacaggcccgtgcccaagtccacgaatacctgggttggcatgccgacaacatccgtggcacctttggagtactcctgtggaccaaggtgttggggccactcattggggtccaggttcccgaggaaaaggtggaacggaacagaaatagtatggtcttggctctgcaacgtctggaggacaagttcctcagggacagggccttcattgctggccagcaggtgacgctagcggatctcatgtctctagaggagttgatacagccggtggctcttggctgtaatctgtttgaggggcggcctcaactgacagcgtggcgagagagggtggaggcgttcttgggtgctgagctatgtcaggaggcgcacaaccccatcatgagcgtcctgggacaggcagccaagaaaacattaccagtaccccctccggaggcccatgccagcatgatgcttcgaattgccaggattccctgagtggttttttttccctgagtatttttattgctataaagactcattttgtattttgcctctttgttttgttttgtttttgtttcttcttgtcccaacctttttttttttttttttttttctggctccttttctggctctgggaggagctttgctcaaaagggacaccacctatccttagcatgcttctcttgaggtacagtatgcacaaccaataggagacccaagtcaataatatataaaaggtgcttaaaaaaaaaaaagcaaacagtaacacacacgaagaaatcaaccaaaaattggtggacatctgttttttattataatatagattctgaatattttaaggaataaagagttattgttttattacattgccctctaatctgtatggaataaattat

SEQ ID NO: 41 - DNA, 1504 bp, Rattus norvegicus
  Genbank Accession No. NM_012816
gctgcgtggcgtcagggttctggagctggcaggcctggccccagggccgttctgcgggatgatcctggcggacttcggcgccgaggtggtgctcgtggacagactgggctccgtgaaccaccccagtcacctggcccgaggcaagcgctcgctggcgctggacctgaagcggtctccgggagccgcggtgttgcggcgcatgtgcgcacgcgcggacgtgttgctggagcccttccgttgcggtgtcatggagaaactccagcttgggccagagactctacggcaggacaatccaaagctcatctatgccaggctgagtggatttggccagtcgggaattttctccaaagtagctggccatgacatcaactatgtggctttgtcaggtgtcctgtcaaagattggcaggagcggtgagaacccataccctcccctgaacctcctggccgactttggtggcggtggcctcatgtgcacattgggcattttgctggctctcttcgaacgcacgcggtctggcctagggcaggtcattgatgcgaacatggtggaaggaacggcatacttaagtactttcctgtggaaaactcaggccatgggtctgtgggcacagcctcgagggcaaaacctgttagatggcggggcacctttctacacaacctacaagaccgcagatggggagttcatggctgtaggtgcaatagaaccccagttctacacactgctgcttaaaggacttggacttgagtctgaggaactccccagccagatgagcatagaagattggccagaaatgaagaagaaatttgcagatgtgtttgcaaggaagactaaggcagagtggtgccagatctttgacgggacagatgcatgtgtgaccccagtgctgactcttgaggaggccctccaccaccagcacaacagagaacggggctccttcatcactgatgaggagcagcatgcatgcccccgtcctgcaccccagctttccagaacccctgctgttccttctgccaaaagggacccttctgtgggagagcacactgtagaggtgcttaaagactatggattcagtcaggaagagatccatcagctgcactcggatagaatcattgaaagtaataagctaaaagccaacctctgactcaggttcacagctcaagtgaatctgaaggctgtatctgtactggagaaggatgcccaccactgtccgtatggaaatgtgaatgaacagtaatgaagtaatccaaatattccaatcaagacacaacgaaagactgattacagagaaatgactgtgctctcacactgctcatccgagcctctgattgaggagtatttttgtgtgtgtactgatattaacttgtggcagttttctgcctttcagcttacttggtgaagtgcattcactgattaaaacccttttgtaaatgcaactctgataatatattaaatgaactaatataactttaataaataaagcttttttttccttgaaaaaaaa

SEQ ID NO: 42 - DNA, 1454 bp, Rattus norvegicus
  Genbank Accession No. NM_012823
ctcaccttctcagagcttctcctcgggcttcgctgccgccctaaaggttactgtgatctcggcttgagagcaaggtggacagccatggcggcgtctttgtgggttggacctcgagggaccataaacaattatccaggctttaacccatcagtggatgccgaagctatccggaaagcaatcaaaggaattggaactgacgagaaaactctcatcaacattctgacggagcggtcgaacgcacagcggcagctgattgtcaagcatatacaagaggcgtatgaacaggcgctgaaagctgacttgaagggtgatctctctggccactttgagcatgtcatggtggctcttattactgcaccggccgtgtttgatgccaagcaactgaagaaatccatgaggggcatgggcacagatgaagacaccctgattgaaatcttaacaaccaggacaagcaggcagatgaaggagatctcgcaggcctattatacagcatataagaagaatctcagagatgacattagctctgaaacgtctggagacttccggaaagctctgctgactttggcagatggtggaagagacgaaagcctgaaagtggatgaacatctggccaaaaaagatgcccagaccctctacgatgctggtgagaaaaaatggggcacggatgaagacaaattcaccgagatcctgtgtctacggagctttccgcagctgaaactgacatttgatgagtacagaaacattagtcagaaggacattgaggacagcattaaaggagaattatctgggcattttgaagacctgctgctggccgtagttcgctgtacgaggaacaccccagcttttttggcaggaagacttcatcaggctttgaagggagctggaacagatgaattcactctgaacagaataatggtctccagatcagagattgaccttctggacatccgacgtgagttcaagaagcactacggctgctctttatactcagccatccaatcagatacttctggagactacagaactgtgctgttgaagatctgtggaggagatgattgaagaagatggcttccaacagctgcctgccccgatggtggaccgcctcaacagctctgcttactgctttcgtacagcactccagcaatgggcaagcgaatgcaagacagcaacccgtctgcctgatgcgcattggcttccttcaatgcaacagcaaaaatgaacttgattttattttagagcatctcattcataatgtagaggtttataagggaaattcaatctagaattaaagacctactaatgattttttatttggcttaggaagttggaatctgtgttgttcaaagccattaaacataaatcaggatactaaaaatggctgcctttgctaaatgtaatttttgtatttgttttccgtaactactaatactgtatgttgcctggtgccaacaaat

SEQ ID NO: 43 - DNA, 318 bp, Rattus norvegicus
  Genbank Accession No. NM_012839
atgggtgatgttgaaaaaggcaagaagatttttgttcaaaagtgtgcccagtgccacactgtggaaaaaggaggcaagcataagactggaccaaacctccatggtctgtttgggcggaagacaggccaggctgctggattctcttacacagatgccaacaagaacaaaggtatcacctggggagaggataccctgatggagtatttggaaaatcccaaaaagtacatccctggaacaaaaatgatcttcgctggaattaagaagaagggagaaagggcagacctaatagcttatcttaaaaaggctactaatgaataa

SEQ ID NO: 44 - DNA, 1242 bp, Rattus norvegicus
  Genbank Accession No. NM_012844
atgtggctggaacttgtcctggcttcccttctgggctttgtcatctactggtttgtctcccgggacaaggaggaaaccttaccactaggagatggatggtgggggccagggtcaaagccatcagccaaagaagatgagagcatccggcccttcaaggtggaaacatcagatgaggagatcaaggacttacaccagaggatagataggttccgggcatccccacctttggagggcagccgcttccactatggcttcaactccaactacatgaagaaagtggtgtcctactggaggaacgagtttgactggaggaagcaggtggagatcctcaaccagtaccctcacttcaagaccaagatcgaagggcttgacatccacttcatccatgtgaagcctccccagctgccctcagggcgcaccccaaagcccttgctgatggtgcatggctggcctggatccttctatgagttttacaagatcatcccactactgactgaccccaagtcccacggtctgagtgacgagcacgtgtttgaagtcatctgtccctcgattcctggctatggctactcagaggcatccagcaagaaaggtttaaattcggtggccactgcgaggattttctacaagctgatgacacggctgggcttccagaaattctacattcaaggcggggactgggggtccctcatctgcaccaacatggcccagatggttcccaaccacgtgaaaggcctgcacttaaatatggctttcatttcgagaagtttttacaccatgactcctctcctgggccaacgcttcgggagattccttggctacacagagaaggatatcgagctcttgtacccctataaggagaaggttttctacagcatcatgagggagagtggctacttacacatccaagccaccaagccagacactgtgggctgtgctctcaatgactctcccgtgggcctggctgcctacatcttagagaagttctccacctggaccaagtcagagtaccgtgaactggaggatggaggcctggagaggatgaaggtctttgtgcccactggcttttcagccttcccttccgagctactgcatgccccagaaaagtgggtgaaggtcaagtaccccaaactcatctcctattcctacatggaacgtgggggccactttgctgcctttgaagagcccaagcttctggcccaggacatccgcaagttcgtgtccctggctgagctgcagtag

SEQ ID NO: 45 - DNA, 318 bp, Rattus norvegicus
  Genbank Accession No. NM_012876
ctcgttcctttttcctccttgggcgtctgaaggcaagatgggtcaccagcagctctactggagtcacccgcggaagttcggccagggttctcgctcttgccgcgtctgctctaaccgccacggtctgatccgtaaatacgggctgaacatgtgccgacagtgcttccgtcagtacgcgaaggacataggcttcattaagttggactaagcgacctgaatggatgattcgactgtctacccaatgaaaccaactgtctaccctgtgataccaatcatgctagtctttgcgcacacagaataaaaaactgaaggcctcta

SEQ ID NO: 46 - DNA, 3007 bp, Rattus norvegicus
  Genbank Accession No. NM_012889
cttttcccagacactttcacgtggggcacaaagaaggctttgaagcagagacttgaaatgcctgtgaagatggtcgcgatcttcggagcctcaacggtactttggatactgtttgcagtctctcaagcttttaaaatcgagatctcccctgaatacaaaacgctcgctcagattggagactccatgctcctgacttgcagcaccacaggctgtgagtcgccatcattctcttggagaacccagatagacagtccactaaatgggaaggtgaagacagagggggccaagtccgttctgaccatggaccctgtcagctttgagaatgaacactcttacctgtgcacagcaacatgtaactctgggaaactggaaagaggaatccaagtggacatctactcattccctaaggatccagagattcaattcagtggccccctggaggttgggaagccggtcatggtcaagtgtttggctcctgatgtttacccaattgacagactggagatagaactgttcaagggtgaccgtctcatgaagaaacaggattttgtagatgagatggcaaagaagtctctggaaaccaagagtttggaagtcatctttactcctgtcattgaggatattgaaaaggctcttgtttgccgagctaaattatacattgaccaaactgattctattcccaaagaaagggagactgtcagagaactacaagtctacacctcccccaagaatacagagatctctgtacatccctccacaaggctacatgagggtgctgctgtgacgatgacatgtgccagcgagggtctaccagctcctgagattttctggagcaagaaattagataatggagttctacagctcctctcgggaaatgccaccctcaccttaattgctatgaggatggaagattctggaatctatgtgtgtgaaggagtgaatctggttgggagagacaaaacagaagtggaattaattgttcaagagaaaccatttactgttgacatctcccctggatctcaggtggctgcacaggttggggattccgttgttctgacatgtgctgctgttggctgtgactctccctccttttcttggagaacccagacagacagtcccctcaatggggaggtgagggatgaaggggctacatccacactgacgctgagccctgtgggtgttgaggatgagcactcttacctgtgcactgtgacctgtcagcgaaggaaactggagaagacaatccaagtggaggtctactcattccctgaagacccagaaattgaaataagtggaccacttgtacacgggagacctgtcactgtcaactgcacggtccctaatgtgtacccctttgaccatctggagattgaactactgaagggggagacaacactgttgaataaatttttaagggaggaaattggcacaaagtctctagagaccaaaagtttggaaatgaccttcatccccaccgctgaagacaccgggaaagctcttgtttgcctcgctaagttacacagcagtcaaatggagtctgaacccaaacaaaggcagagtacacagactctttatgtcaacgttgctccgaaagaacccaccatctgggttagcccctctcctgtcccagaggagggcagtcctgtgaacctgacctgctcaagtgatggttttccaactcccaaaatcctgtggagcagacagctaaagaacggggaactgcagcctctttctcaaaatacaacactctccttcatggctacaaaaatggaagattccggcatttatgtatgtgaagggattaatgaggctggaattagcaaaaaatcagttgaactgattatccaaggctcttcgaaggacatacagcttacagtcttcccatctaagagcgtcaaagagggagacactgtcattatctcctgtacttgtggaagtgtgcccgaaatatggataattctgaaaaagaaagccaagacaggagacatggtgctaaagtctgttaatggctcgtacaccatccgcaaggcacagctgcaggatgccggagtatacgagtgtgaatcgaaaaccgaagtcggctcgcagttgcgaagtttaacacttgatgtgaaaggaaaagaaaataacaaggactatttttcccctgaactccttgcactctactttgcatcctccttggtaatacccgccattgggatgatcatttactttgcaagaaaagccaacatgaaaggatcgtacagtctggtggaggcacagaagtcaaaagtgtagctaacgtctgaactgttggagaaaagacattatttataaaccccggacccttcatactctttattgcagcactgttccccctccacaaaccaagctatgcattcagacttctcagaacccttctcggcaaagaaggaaaagaagtggccacttgatcccttgctgagtgcaagaagccaactagaaatcttctgctcggcaagtccccattgctgaagagaccggaacagtcccatgacatgtatataaatagcctcagtgtacatatgtaaaataaaatgatgtcattgcgaggtcgtttagagtagtagcactccagatgtaggtcagaacaaaatcaaaacgtgttgcttggactgactgttgtaacttcatgcttcttaggaaagtttaatgttggtgttaatgttgagtaggcagctgaccagtgtcacctttttgtactttattttcttcagcctaattttattcctatgcattttattgacaatgatttcatgtttttttttaaagaagccagggttttatatttttataggcaaatggtaaaaaggtcactgggttgactttcaggtactactttcctaattcatggtatactgattaagtagttttctcaactgtacggtacggggacgtgtttcttcatcaggatcttgtataatgactaacatggtttaaatgcaacttcatttgacttataaatactacagtaaagtgaaagtttctg

SEQ ID NO: 47 - DNA, 2117 bp, Rattus norvegicus
  Genbank Accession No. NM_012891
aattccgcggcggctttggagatgcagtcggcccggatgaccccgagtgtggggcgacaactgctgcggctgggggcccgaagctcgcggtctgctgcgcttcagggacaaccccggcctacctctgcccagcgactttatgccagtgaggccactcaggcagttctggaaaagccagagaccctctcctctgatgcttccaccagagaaaaacctgccagggcggaatctaagtcttttgctgtgggaatgttcaaaggccagcttaccaccgaccaggtgttcccatacccatctgtgctcaatgaaggacagacacaatttctcaaagagctggtgggaccagtggcccggttctttgaagaagtgaatgaccctgccaagaatgactccttggagaaggtggaggaggacactttgcagggactcaaagaactgggggcatttggtctgcaagtacccagcgagctgggtggtttgggcctctctaatacccagtacgctcgcttggcagagattgtgggcatgcatgaccttggtgttagcgttaccctgggagcccatcagagcatcggtttcaaaggcatcttgctctatggcacaaaggcccagaaggaaaaatacctccccagagtggcatccgggcaggctttggcggctttctgcctgactgagccctcgagcgggtccgatgtggcctctatccgaagctcagctgtacctagcccctgtggaaagtattatactctcaacggaagcaagatctggatcagtaatgggggtctggcagacattttcactgtctttgccaaaacgccaattaaagatgcagccacgggggccgtgaaagagaagatcacagctttcgtagtggaacggagctttggaggggttacccatgggctccccgaaaagaagatgggcatcaaggcatctaacacatcagaggtgtactttgatggagtcaaggtgccagcagagaatgtgctaggagaagtgggagatggcttcaaggttgctgtcaacatcctcaacaacggaagatttgggatggctgcaaccctagcaggcaccatgaaagccatcattgccaaggcggttgatcatgctactaaccgtacccagtttggggacaaaattcacaactttggggtgatccaggaaaagctggctcggatggctattctgcagtatgtgactgagtccatggcttacatgctgagtgccaacatggaccagggattcaaagacttccagatagaagctgccatcagcaaaatctttggctcggaggcggcctggaaagtgacagatgagtgcatccagataatggggggcatgggcttcatgaaggaaccaggggtagagcgtgtgctccgagatattcgaatcttccggatctttgaagggacaaatgacattcttcgactgtttgtggctctacaaggctgcatggacaaaggaaaggaactcacgggacttggtaatgccctaaagaatcctcttggaaatgttggcctcctcataggagaagcaagcaaacagctgaggcggcggacagggattggcagtggtctgagtctctcgggaattgtccacccagagttgagtcgcagtggtgaactggcagtgcaggctctggaacaatttgccactgtagtggaggcgaagctgatgaagcacaagaaagggattgtcaatgaacagttcctgctgcagcgactggcagatggagccattgacctctacgccatggtggtggttctctccagagcctcaagatccctgagtgagggctacccgacagcacagcatgagaaaatgctctgtgatagttggtgcattgaggctgcaacacggattcgagaaaacatggccagccttcagtccaaccctcagcagcaggagctctttcgtaacttcagaagtatctccaaggccatggtggagaatggtggcctggtcaccagtaacccccttagagtctgaagactcctaatcaggccctagcacagtcgtgtgccttcttctatgccaaacacaggcccccttcatgggggcactggagtacttactgccttaaggacaataaattttctaccaaaaaaaaaaaaaaa

SEQ ID NO: 48 - DNA, 1464 bp, Rattus norvegicus
  Genbank Accession No. NM_012898
tctagctctccaagctgattatctgggctgcccctgacatttgtccatctcccagggcctctctggagcagccatgaagtccctggtcctgctcctttgttttgctcagctctggagctgccaatcagctccacaaggtgcagggctgggttttcgagaattggcttgtgatgacccggaaacagagcatgtagctttgatagccgtgcactacctcaataaacatcttcttcagggattcaggcagatcttgaatcagattgacaaagtcaaggtgtggtctcggcggcccttcggacaggtgtatgagttggaaattgacacgctggagacaacctgccacgctctggacccaacccccttagcaaattgttctgtgaggcaacaggccgagcatgcggtggagggagactgtgacttccacatcctgaaacaagatggccagttcagggtgctacacgcccagtgtcattccacaccagactctgcagaggacgttcggaagttttgcccacgatgcccaatcctgatccggttcaatgacaccaacgtggtccacactgtcaaaactgccctggctgccttcaatgcacagaataatggaacctattttaaactggtggagatttcccgagctcaaaatgtgcctttcccggtgtctactctcgtggagtttgtgatagctgcgactgactgtactggtcaggaggtcacagatccagccaaatgcaacctgctggcagaaaagcaatatggcttctgcaaggcgactctcatccacagacttggtggggaagaggtttcagtggcctgcaagttattccagacacagccccagccagccaatgccaaccctgcaggtcctgcacccacagtgggccaagctgcgcctgtagccccaccagctggcccacctgaatccgtggtggtaggacccgtggcagttcctctaggacttccagaccaccgaacccaccatgacctacggcatgccttctctcctgtggcttctgtggagtcggcctcaggagaagttcttcactcacctaaggtgggccagcctggtgacgctggtgctgctggcccagtggcccccctgtgcccagggagagtcagatacttcaagatctaggcttgactcagggaagtaaggttttggcaggcaggacatagccaccactgaagtagagggcttgtccactgaccaagcaagtaccacatcatagcttgaattcaggtctcttcattccccagagaaaaggggcagagaggtgatggttaaatttgttgaaagccagcagcagcaacactagcacttgtggggtgacagactactgtcatttgtttctttgccttctcactgacctcatacaaagcagttgcaagcgcgactgtgaaaggtgctctcaccaaacttcaatctacccataaataaaagtacccgaaggagctttcttaaacaag

SEQ ID NO: 49 - DNA, 4472 bp, Rattus norvegicus
  Genbank Accession No. NM_012914
actgccgtcggggaaggtcccagcgcggtcatggcctcccagggcggccgccccgcctcaagttcgcagcattctgcacagtagcccggaggagaagcggcctggacgtcgcggccggccggggaagcagcatggaggaggcgcacctgctctcggctgccgacgtgctgcgtcgcttctcggtgacagccgagggcggcttgaccctggagcaggtgaccgacgcccgggagcgatacggccccaacgaactccctactgaggaagggaaatccctgtgggagctggtggtggagcagtttgaggacctcttggtgcgcatcctgctgctggcagccctggtttcctttgtcctggcctggtttgaggagggtgaggagaccacgacggccttcgtggagcccctcgtcatcatgttaatccttgtggccaatgcgatcgtgggagtgtggcaggaacgcaatgctgagagtgccattgaggccttgaaggagtatgagcctgagatgggtaaggtgatccgctctgaccgcaagggtgtgcagaggatccgagccagggacatcgtccctggggacattgtggaagtggcagtgggagacaaggtacctgctgacctccgcctcatcgagatcaagtccaccacacttcgagtggaccagtccatcctgacaggggaatccgtgtctgtgactaagcacacagatgccattccagacccccgagccgtgaaccaggacaagaagaacatgctgttttctggcaccaatattgcatcaggcaaagccctgggtgtggctgtggccacaggcttgcacacagagctgggcaagattcggagccagatggcggctgtggagcctgagcggacgccactgcagcgcaagctggatgaatttgggaggcagctgtcccatgccatctctgtgatctgtgtggctgtgtgggtcatcaacatcggacactttgctgacccggcccatggtggatcctggctccgtggggcagtctactacttcaagattgctgtggccctggctgtggctgctatccccgagggcctcccagcagtcatcactacatgcctagcactgggcacaagacgtatggcacgtaagaacgccattgtgcggagcctgccctctgtggagaccctgggctgcacctcagtcatctgctctgacaagacagggacactcaccaccaatcaaatgtctgtctgcaggatgttcgtggtagctgaagcagaggcaggcgcctgtcgtttacacgaattcaccatttcgggtaccacgtataccccagagggcgaagtgaggcaaggggaacagcttgtgcgctgtgggcagtttgatggacttgtggagctcgcaaccatctgtgcactctgcaatgattctgcactggactacaatgaggccaagggtgtgtatgagaaggtaggagaggccacagagacagccctcacttgcctggtagagaagatgaacgtgtttgacacagacctgaaaggactgtcgcgggtcgagcgcgctggtgcctgcaattccgtcatcaagcaactcatgcagaaggagttcaccctcgaattctcccgggaccggaagtccatgtctgtgtactgcacacccactcgtgctgaccccaaggcccagggcagcaagatgtttgtgaagggagctcctgagagtgtaattgagcgctgcagctcagtccgcgtgggaagccgaacagtacccctaagcgccacctccagagagcatatcctggccaagatccgagactggggctcaggctctcatacattgcgctgcttagcactggccaccagggacacacccccaaggaaggaggacatgcaactggatgactgcagtcagtttgtacagtacgagacaggcctgaccttcgtgggctgcgtgggcatgttagacccaccgagaccagaggtggctgcctgtatcacacgctgttctcgggcgggcattcgagtggtcatgatcacaggggacaacaaagggacagctgtggccatctgccgccgacttggcatctttggggatacggaggatgtgttgggcaaggcttacacgggccgagaattcgatgacctcagcccagagcagcagcgccaggcttgccgtaccgcccgatgctttgcccgtgtggaacccgcacataagtctcgcatcgtggagaacctccagtcctttaatgagatcaccgccatgactggcgatggggtgaatgatgcaccagccctgaagaaggcagagatcggcatcgccatgggctcaggcactgctgtggccaagtcggcagcggagatggttctgtctgatgacaactttgcctccattgtggctgcagtggaggagggcagggccatctacaacaacatgaagcaattcatccgctacctcatctcctccaatgttggcgaggttgtctgcatcttcctcacagcaattctgggcctgcccgaagccctgatccctgtgcagctgctctgggtgaacctggtaacagatggcttacctgccacagcccttggcttcaacccacccgatctggacatcatggaaaagctgcctcggaacccccgggaggctctcatcagcggctggctttttttccgctatttggctattggagtgtacgtaggcctggctacagtggctgccgccacctggtggttcctgtatgacgctgagggaccacaagtcaccttccatcagctgaggaacttcctgaagtgctctgaagacaatccactgtttgccggcatcgactgcgaggtctttgagtcacgcttccccacgaccatggccttatctgtgcttgtgaccattgaaatgtgcaacgcccttaacagcgtctcagagaaccagtcactgctgcgtatgccaccctggctgaacccttggctgctgggggctgtggtcatgtccatggccctgcattttctcatccttttggtgccgcctctgcccctcattttccaggtgaccccactgagtggtcgacagtggggggtggtgcttcagatgtctctgcctgtcatcctgcttgacgaggccctcaagtatctgtccaggcatcacgtggatgaaaaaaaggacctgaagtaaatcctgagagcagaggggggtctccagttcggccctcggactcatcatgtccaagcacttgtcctggtcccacccctgcctcctcactcagccacctgtctcctgctgaacgtaacaggcctgaaacaacaccggccatttctaggccctgttccagggtcctgtctccattcctgtcctccctacagctctggcccagaagttgagcccaggaggggaagctgagaagccagagctgcctgaagggccaccacccatttcccccacagatctgcagccttcccctgctcggaggtgggcatttgcttggtagctagtgcctctgccctgatggagggctcatgggggccgtcttactgactctgacctcttgcttagtttgggtctggagcctggtcagctctgggaaggaggagtccgaggggaccatctgggtccagctgtgaacatgaggggcagccccttccacttggctcagcttccaccaagtccactcctgtgtctgtttatgtatctgctggccccagggagttgaaggatcacagacagataggaacataaggagcagcgggggcaggcctggacaaggactcctttcccaggagtcagcctccactggctggctgggctcagcactagtcccaccttgaggctcacttcctcggctcaggttggctcagggatcctaactttacagtccatgcccctggtgcctgagactccaggcatccctgggtccatgtcagcttctcctgccacgaagcctggggtgataccgtgtcacttgctgcagggctgggtgattctaaacctcctggacccctggcattactctttgccctcttttcctatcatgcatgtctgagtcagagagatgtcactaggaagtgactccacaatcctcccctacctccccactgaaaggaagcatctgatgggggtctatcagatgaatgtgtattggtctttgggatcttttttgcctcttaaccctgctgttgctcctttgacaaaagctagctaagcatcatgggaaacggagaaagcgcctgtcagtgtgacttagctcttccctgactgtgtataatatgattattttatatgtaaatcaaggttcacatcactgtcctgacacctggtagcaaaagtcccctcagcctacccagaagacagatgaactccatgtatacctgcccactctcctgcccatcctccctcccctctggcaggttctggaggggcctcagagagaaaccgagtttggagggatggcttggcaggaacagagccctgtgcccacttgctgatcatttcttgtggagaaataaaggcgtgcgtctg

SEQ ID NO: 50 - DNA, 3335 bp, Rattus norvegicus
  Genbank Accession No. NM_012931
gtacgcgggtagcacggcctctggccgtggagcaccatgaagtacctggtgagtgtgggcgcggggccggccaggcgggcgggcggtctggaggacgtttcctgggggccccgagtgtcccgccggccgcagagttaccgggcagctcggcacgtaaacgagtccctccctcggtccgcctttcgagtccccgcagctcacggagctagcgtgacgccctccgcagcccttgggtccgggttgcctgagactcagcccgaggcggtatgcagagggactgagaaaccgagatttgctgagggctgcaaaccggcggcgagccgcgacaagaacgtgctggccaaagccctctatgacaacgtagctgagtctccggatgaactctccttccgaaagggtgacatcatgacagtgctcgagcgggacactcagggcctggatggctggtggctctgctcactgcatgggcgccagggcattgtgcctggtaaccgcctcaagattctggttggcatgtatgacaagaagccagcagcacctggaccaggcccacctgccaccccaccccagccccagcccagccttccccagggcgtccatactccagtgcctccagcttcccagtacagtcccatgctccccactgcataccaaccccaacctgacaatgtgtacctggtacccactcccagcaagactcagcaaggtctctaccaagcccctgggcccaacccacagttccagtcacccccagccaaacaaacatccacattctcaaagcaaacacctcatcactcatttcccagccctgccacagacctttaccaggtgcctccagggcctggaagtccagcccaggacatttaccaggtgccaccttccgctggcacagggcatgacatctaccaagtccctccatctttggacacccgcagctgggagggaacgaagccaccggcaaaggtggtggtacctactcgagtgggacagggctatgtgtacgaggcctcccaggcagaacaggatgagtacgacaccccgcgccacctgctagctccaggttcccaggacatctatgatgtgccccctgttcgaggactgcttcccaaccagtatggccaggaggtatatgacaccccgcctatggcagtcaaaggccccaatggccgagacccgttgttggatgtgtatgacgtgccccctagtgtggagaaaggcctgccgccgtccaaccatcattcggtgtatgatgttcctccttctgtgagcaaggatgtgcctgatggcccactgctgcgtgaggaaacatatgatgtaccccctgccttcgccaaacccaagccttttgatccgacccgacatccattaatcctcgctgcacctcctccggactccccaccagctgaggatgtgtatgatgtgccaccccctgctcctgacctctatgatgtgccccctggtttgcggcggcctggccctggaacactgtatgacgtgcctcgagagcgggtgctccctcctgaggtggctgatgggagtgtaattgatgatggtgtgtatgctgtgcccccaccagccgagcgagaggcgccaacagatggcaagcgcctgtcggcctctagcacgggcagcacacgcagcagccaatcggcgtcttccttggaggtagtggtgccaggtcgggagcccctggagctggaagttgctgtggagaccctggctcggctacagcagggtgtgagcaccaccgtagcccaccttctggacctggtgggcagtgccagtggccccgggggctggcgtagtacctctgagccccaggagcctcccgtgcaggacctgaaagctgcagtggccgcagttcatggggcagtacatgagctcctggagtttgcccgcagtgcagtgagcagtgccactcacacttctgaccgcactttgcacgccaagcttagccggcagctacagaagatggaggatgtgtaccagacactggtggtccatggtcaggtccttgacagtggccggggaggtccaggattcactctggacgacctggaccgcctggtggcctgctcacgggctgtgcccgaggatgccaagcagctggcctcctttttgcatggtaatgcctcgctgcttttcagacggaccaaagcccctggccccgggcctgagggcagcagctccctgcacctcaaccccaccgataaagccagcagcatccagtcacgccctctaccctcacctccaaagttcacctcccaggactctccggatggccagtatgagaacagtgaagggggttggatggaggactatgactacgttcatctgcaggggaaggaggaatttgagaagacccagaaggaactgctggaaaagggcaacatcgtgcgacagggaaaaggccaactggagctgcagcagctgaaacagtttgagcgactggagcaggaggtgtctcgtcccatagaccatgacctggccaactggacaccagcccagccccttgtgccggggcggacagggggactggggccttcagaccgacagctgctgctcttctacttggagcagtgtgaggccaacctgaccacactgacagatgcggtggacgccttcttcaccgcagtggccaccaaccagccacccaagatctttgtggcacacagcaagtttgtcattcttagtgcacacaagcttgtgttcattggggacacactgtcacggcaggcaaaggcagctgatgtgcgaagcaaagtgacccactacagcaatctgctgtgtgacctcctgcgtggcatcgtggccaccaccaaggccgctgccctgcagtacccatccccatctgctgcccaggacatggtagacagggtcaaggagctaggccacagcactcagcagttccgccgtgtcctgggccagctggctgccgcctgaaagcagaagactgggctgtgaggctggggagtgggtagcggtggtgtgagctacccaggcgctcgtcttgaagtggagatcctgcaggtttggggacaggtaaccccagctctgctttgggcctggtgccctcaactgtccagggatttgtacatatttatatcaaggcaggatgcagaatgcctcctcggagaggctgaggagccccgtcagagtggaccatgggctgggatcaccagggttggggcacatgggctccagtccacagggctccctgggacaggaagtacagtgtggtgtacacctctgcaccaagaaaacctaaagaactatttttcactattgatttttttccaatcatttgactaatagtctacatttaataaaatttt

SEQ ID NO: 51 - DNA, 2602 bp, Rattus norvegicus
  Genbank Accession No. NM_012967
ctgctgcctgcactttgccctggtcctccaatggcttcaacccgtgccaggcccatgctgcctctgctcctggtcctggtcgccgttgtgatccccgggcctgtcggtgctcaggtatccatccatcccacagaagccttcctgcctcggggtggatccgtgcaggtgaactgctcttcctcttgcgaagacgagaacctcggcctggggttggagactaactggatgaaagacgaactatcgagtggacacaactggaagctcttcaagctgagcgacattggggaagacagcagaccactgtgctttgagaactgtggcaccacgcagtcctcggcttctgccaccatcactgtgtattcgttcccagagcgagtggagctggatcctctgcccgcctggcagcaggtgggcaagaacctcatcctgcgctgcctggtggaaggcggagcaccgcggacacagctctcagtagtgctgctccgtgggaatgagacactgagccgccaggcagtggatggggaccccaaggagatcacattcacggtgctggccagcagaggcgaccacggagccaatttctcatgcttcacagaactggacctcaggccacaagggctgtcactgttcaagaatgtctccgaggtcaggcagctccggactttcgatcttccgactagggtcctgaagctcgacacccctgacctcctggaggtgggcacccagcagaagttcttgtgttccctggaaggcctgtttcctgcctctgaagctcagatatacctggagatgggaggccagatgctgaccctggagagcacaaacagcagagattttgtgtcagccactgcctcagtggaggtgactgagaagttggacagaaccctgcagctgcgctgtgttttggagctggcggaccagaccctggagatggagaagaccttgagaatctacaacttttcagctcccatcctgaccctgagccagccggaggtctcagaaggggaccaagtaactgtgaagtgtgaagcccacggtggggcacaggtggtgcttctgaacagtacttcccccaggccacccacctcacagggtacttcccccaggccacccacctcacagatccaattcacactgaatgccagcccggaggatcacaaacgacgcttcttttgctctgcggccttggaggtggatgggaagtccctgtttaaaaaccagaccttggaactccatgtgctatatggtcctcacctggacaagaaggactgcttggggaactggacctggcaagaggggtctcagcagactcttacatgccagccccaggggaatccagcccctaatctgacctgcagccggaaagcagatggtgtcccgctgcctatcgggatggtgaagtctgtcaaacgggagatgaatggtacctacaagtgccgtgcctttagctcccgtgggagtatcaccagggacgtgcacctgacagtgctgtaccatgatcagaatacctgggtcataattgttggtgtgttggtactgatcattgcgggcttcgtgatcgtggcgtccatttacacctattaccgccagaggaagatcaggatatacaagttacagaaggctcaggaggaggccctaaaactcaaggtacaagccccgcctccctgagcccactggacaggacacctgcctgggccccgctgctcttgaacagatcaatggacagcatttacccctcacccacctcctctggctgtcacaggacaggacagtggcctggggatgcatacttgtagcctcaggcctaagaggactcggaggggcaagactgtgaactcgtgacctggacacacctacagcctggtgggcctgcagccaagaaaggctgacttccttctctattacccctgctgaggggccccctaccttaggaaggtgtgatatccggtagacacaagcaagagaagaaaaggaacaccatgcttcctctgacatgggaaagctgggacactgtccccaactcttgttgatgtatttattaattcagagttctgacagttatttattgagtaccctgtacagacactagaggagtgagcaggttaacatgtaagttattgcctagaccctggtgaaggggcacaacagagtctggggaaagatcatacgggtttgggcttctccacaggtcagggtgctttcctcaaaagagctgatttctttcacgagtcatataaatactatgtggacgagcagtggccctctgctcgtagacctctctgggacccctgcctcctcccacagcctggagtctcccagcaccagcatgggtgaccacctccccacctacatacattcctacctttgttcccaatgtcaaccaccatgcctaaatatggacgctcacctttagcagctcaacaatggagtctcatgcccgtgaaattatggtcaatccctgcatgcctccacccggctccacctcaaagagaatgcctgggagaaaatgttccaaccacttagaagggtcctgcaagctgttgtgggagggtaggcacccctcccagcgcagaagcctttcctttgaatcaataaagtttta

SEQ ID NO: 52 - DNA, 585 bp, Rattus norvegicus
  Genbank Accession No. NM_012973
cgtccatccaggtccaggcgtgcagagttttgctccacatcagggaaaccgtgaagccccaggatggccctgtccaattccacaactgttctgccttttctggcctcgctgtggcaggaaacagatgagccgggtggcaatatgtcggcggacttggctcgtaggtcccagctccgagatgacagcaagctggaggctctctatatcctcatggtgctgggtttcttcggcttcttcaccctgggcatcatgctgagttacatccgatccaagaagctggaacactcgcacgaccctttcaacgtgtacatcgagtcggacgcctggcaggagaaaggcaaggccctcttccaggcccgcgttctggagagcttcagagcttgctatgtcattgaaaaccaggcggccgtagaacaacctgccacacaccttcctgaactgaagccactgtcatgaaccccatagttaattaatagacaagtgataagtgggtctttctagtcaaatgcctgccagtctttattgtagaggtacccttgagtttttataaggggtgagttaataacaccagttttctgaaattgc

SEQ ID NO: 53 - DNA, 872 bp, Rattus norvegicus
  Genbank Accession No. NM_012976
ggaagagagcgttggttctcccaagacagaagagatgtcttccttcagcacccagactccatacccgaacctagctgtacctttcttcaccagcatcccaaatgggctttacccatccaagtccatcgtcatatcaggcgtggtcttgtcagatgctaagaggttccagatcaaccttcgctgtgggggtgacattgctttccacctgaacccccgttttgatgagaatgctgtggtccgaaacactcagatcaacaactcctgggggcccgaagagcgaagcctgcctgggagtatgcccttcagtcgtggccagagattctcagtgtggatcttatgtgaaggtcactgcttcaaggtggccgtggacggtcagcatatttgtgaatacagccaccgcctgatgaacttgccggatatcaacactctagaggtggctggtgatatccagctaacacacgtggagacctaggaaggtctctggcctagggatgaaggctgaggaaccctacctgagtcttgtcacctcttccctgtctcagccctgcctccccaaatcctgtcatcaaagagagcctcattggcaggagttccaggaaggtgacattcccaattcacaccctccacaaagggggagtcctgggctgtgggacacatggctgtgagcccacagtgtcagccattgctcccaagctagtcatcttctgagggaagtgacctccctgggtttgcccctttctctgaccctttcccttcacccctccaggagggccaccttgatgtcatcccactggcctccaactgacccagaatgtccacattaacttttccccaatctttcccaatgcccataaaataaagaatatcaacgc

SEQ ID NO: 54 - DNA, 1545 bp, Rattus norvegicus
  Genbank Accession No. NM_012977
gtgaactcgtgggagtcccgccctgtgcagagttctgtccagcaagtgaggaagagagcgttggttctcccgaaacagaagagatggctttcttcagcacccagcctccatacatgaacccagtcatcccctttactggaataatccaaggagggttgcagaacggacttcagatcaccctccaggggaccgtccacccttttccaaataggattgcggtgaactttcagactggcttcagtggaaatgacattgccttccacttcaatccccggtttgaggaaggaggatatgtggtttgcaacacaaagcagaatggaaagtgggggcctgaggagaggaagatgcagatgcccttccagaaggggatgccctttgagctttgcttcctggtacagaggtcggaattcaaggtgatggtgaacaagaacttctttgtacagtactcacaccgcgtgccctaccacctcgtggacaccatttcggtctcgggatgcttgcacctgtccttcatcaacttccagactcagggctttcagcctgcccaccaggcacccgtggctcaaactatcatccacacagttcacagcatccctggacagatgctctctactcctggaatccctcctatggcataccccaccccagcctatactatacctttcttcaccagcatcccaaatgggttttacccatccaagtccatcaacatatcaggcgtggtcttgccagatgctaagaggttccatatcaaccttcgctgtgggggtgacattgctttccacctgaacccccgtttcaatgagaaggttgtggtccgaaacactcagatcaacaactcctgggggcccgaggagcgaagcctgcctgggagaatgcccttcaatcgtggccagagtttctcagtgtggatcttatgtgaaggtcactgcttcaaggtggccgtggatggtcagcatatttgtgaatattaccaccgcctgaagaacttgccggatatcaacactctagaggtggccggtgatatccagctgacacacgtgcagacctaggaaggtctctggcttagggatgaaggctgaggaaccctacctgagtcttgtcacctcctccctgtctcagccctgcctccccaaatcctgtcatcaaagagagcctcattggcaggagttccaggaaggtggcattcccaattcacaccctccacaaagggggagtcctgggctatgggacacatggctgtgagcccacagtgtcagccattgctcccaagctagtcatcttctgagggaagtgacctccctgggtttgcccctttctctgacctttcccttcacccctccaggagggccaccttgatgtcatcccattggcctccagctgacccagaatgtccacattaccttttccccaatctttcccaatgcccataaaataaagaatatcaacgcttgtctacaaaaaaaaaaaaaaaaaaaaaaaaaaaaaaaaaaaaaaaaaaaaaaaaaaaaaaaaaaaaaaaaaaaaaaaaaaaaaaaaaaaaaa

SEQ ID NO: 55 - DNA, 1232 bp, Rattus norvegicus
  Genbank Accession No. NM_012992
gttttccgtccggcttctctcacactcaagtgcgcgcctccacctcatggaagactcgatggacatggacatgagccctcttaggcctcagaactaccttttcggttgtgaactaaaggctgacaaagattatcactttaaagtggataatgatgaaaatgagcaccagttatcattaagaacggtcagtttaggagcaggggcaaaagatgagttgcacatcgtagaggcagaagcaatgaactatgaaggcagcccaattaaagtaacactggcaactttgaaaatgtctgtacaaccaacagtttcccttgggggcttcgaaattacaccacctgtggtcttgaggttgaagtgtggttctgggcctgtgcacataagtggacagcacctagtagctgtagaggaagatgcagagtcagaagatgaagatgaggaagatgtaaaactcttaggcatgtctggaaagagatctgctcccggaggtggtaacaaagtcccacagaaaaaagtaaaacttgatgaagatgatgatgaggatgatgaagatgatgaggatgatgaagatgatgatgatgatgattttgatgaagaggaaactgaagaaaaggttccagtgaagaaatctgtacgagataccccagccaaaaatgcacaaaaatcaaaccaaaatgggaaagatttaaaaccatcaacaccaaggtcaaagggtcaagagtccttcaaaaaacaggaaaaaactcccaaaacacccaaaggacctagctctgtagaagacattaaggcaaaaatgcaagcaagtatagaaaaaggtggttctcttcccaaagtggaagccaagttcattaattatgtgaagaattgtttccggatgactgaccaggaggctattcaagatctctggcagtggaggaagtctctttaagaaaatggtttaaacagtttgaaataattctgtcttcatttctgtaatagttgctatctggctgtcctttttataatgcaaagtgagaactttccctactgtgtttgataaatgttgtccaggttcaattgccaagaatgtgttgtctaaaatgcctgtttagttttcaaggatggaactccgccctttacttggttttaagtatgtatggaatgttatgataggacatagtagtagtggtggtcagatgtggaaatggtagggagacaaatatacatgtgaaataaactcagtattttaataaagt

SEQ ID NO: 56 - DNA, 2460 bp, Rattus norvegicus
  Genbank Accession No. NM_012998
ccccggcgccaacctagctgccccgcccgctgccgacgtccgacatgctgagccgtgctttgctgtgcctggccctggcctgggcggctagggtgggcgccgacgctctggaggaggaggacaacgtcctggtgctgaagaagagcaacttcgcagagccggcggcgcacaactacctgctggtggagttctatgccccatggtgtggccactgcaaagcactggccccagagtatgccaaagctgctgcaaaactgaaggcagaaggctctgagatccgactagcaaaggtggacgccacagaagagtctgacctggcccagcagtatggtgtccgtggctaccccacaatcaagttcttcaagaatggagacacagcctccccaaaggaatatacagctggcagggaagctgacgacattgtgaactggctgaagaaacgcacaggcccagcagccacaaccctgtctgacactgcagctgcagagtccttggtggactcaagcgaagtgacggtcatcggcttcttcaaggacgcagggtcagactccgccaagcagttcttgctggcagcagaggctgttgatgacataccttttggaatcacttccaatagcgatgtgttttccaagtaccagctggacaaggatggggtggtcctctttaagaagtttgatgaaggccgcaacaattttgaaggtgagatcaccaaggagaagctattagacttcatcaagcacaaccagctgcctttggtcatcgagttcactgaacagacagctccaaagattttcggaggtgaaatcaagacacatattctgctgttcctgcccaagagtgtgtctgactacgatggcaaattgagcaactttaagaaagcggccgagggctttaagggcaagatcctgttcatcttcatcgatagtgaccacactgacaaccagcgcatacttgagttctttggcctgaagaaggaggaatgtccagctgtgcggcttattaccctggaggaagagatgaccaagtacaaaccggagtcagacgagctgacagctgagaagatcacacaattttgccaccacttcctggagggcaagatcaagccccacctgatgagccaggaactgcctgaagactgggacaagcagccagtgaaagtgctagttgggaaaaactttgaggaggttgcttttgatgagaaaaagaacgtgtttgttgaattctatgctccctggtgtggtcactgcaagcagctagccccgatttgggataaactgggagagacatacaaagaccatgagaatatcgtcatcgctaagatggactcaacagccaatgaggtggaagctgtgaaggtgcacagctttcccacactcaagttcttcccagcaagtgcagacagaacggtcattgattacaacggtgagcggacactagatggttttaagaaattcttggagagcggtggccaggatggagcgggggacaatgacgacctcgacctagaagaagctttagagccagatatggaagaagacgacgatcagaaagccgtgaaggatgaactgtagtgcagaagccagatctgggcgcctgaacccaaaacctcggtgggccatgtcccagcagcccacatctccggagcctgagcctcaccccaggagggagcgccatcagaacccagggaatctttctgaagccacactcatctgacacacgtacacttaaacctgtctcttctttttttgcttttcaattttggaaagggatctctgtccaggccagcccatcttgaagggctacgttttgttttaattggtggtgtacttttttgtacgtggattttgtcccaagtgcttgctaccatatttggggatttcacactggtaatgtctttcctgttagagaggtttatgctatcacttcagatttcgtctgtgagatgtttcatcttcctgacatgtctccatgtcgaggtacttgttccaccacgcagacctccctgagaccccttcctgccctgcgcaggaggcgatggttctgggtcgtatgctctctctctctccaccttgtactagtgttgccatgacagcatggcttttgtagtttgcatttaacctggggatttctgcatcctgtcagagggtgggtccccacgtgtggaaaagagacagtggtggcttgctgccaggctcaggccaggcctggacagctctcactcttcttaagccagaactaccgaccagccggccggctgtgggcacattactctggctgctggatcctcttccagcatggcatgtggcctgtgtgaggcagaaccgggacccttgattcccagactgggagtcagctaaggacactggggctgaatgaaatgcccattctcaaggtctatttctaaaccataatgttggaattgaacacattggctaaataaagttgaaattttactaccat

SEQ ID NO: 57 - DNA, 4153 bp, Rattus norvegicus
  Genbank Accession No. NM_012999
tcgggcgccgcgcgagcctgccgctgccatgcctccgcgcgcgccgccagcgcccgggccccggccgccgccccgggccgccggccggcacgggctctcgccgctggcgccgcgcccctggcgttggctgcttctgctcgctctgcccgccgtctgctccgcgctgccgccgccgcgccccgtctacaccaaccactgggcagtgcaagtgctgggcggccccggcgcggcggaccgcgtggctgcggctcacggctacctcaacttgggccagattggaaatctggacgattactatcatttttaccacagcaagaccttcaagagatcaaccttgagtagcaggggcccccacaccttcctcagaatggacccacaggtaaaatggctccagcaacaggaagtgaaacgcagggtcaagagacaggcgcgaagcgactctctttatttcaatgatcccatttggtccaacatgtggtatatgcattgtgctgataagaacagtcgctgtcggtcagagatgaacgtccaggcggcatggaagcgcggctacacaggaaagaacgtggttgtcaccatcctcgatgacggcatagaaaggaatcacccagacctggcccccaactacgattcctatgcaagctacgatgtcaacggaaacgattatgacccatcaccgagatatgatgccagcaacgagaacaaacatggtactcgctgtgcgggagaagtcgctgcttcagccaacaactcctactgcatcgtgggcatagcatataatgcaaagataggaggcatccggatgctggacggtgacgtgaccgacgtggttgaggccaagtctctgggcatcagacccaactacattgacatttacagcgctagttgggggccagatgatgatgggaagaccgtggatgggcccggccgtctggctaaacaggctttcgagtatggcattaaaaagggccgccaaggtctgggctccatttttgtctgggcctctgggaatggtgggagagaaggggaccactgctcctgtgatggctacaccaacagcatctacaccatctctgtgagcagcaccactgagaacggccacaaaccctggtacctggaggaatgtgcttccaccttggctaccacctacagcagcggggccttctatgaacggaagatcgtcaccacggacctgcgtcagcgctgcaccgacggccacactgggacatctgtctcagctcccatggtggctggcatcattgccctggctctagaagcaaacaaccagttgacctggagggacgtgcagcacctgttagtaaagacgtcacggccggctcatctgaaggcgagtgactggaaagtcaacggagctgggcataaagttagccatctctatggatttggcttggtggatgctgaagcgctcgtcctagaggcaaggaagtggacggcagtgccatcccagcacatgtgcgtggccaccgcagacaaaaggcccaggagcatccccgtagtgcaggtgctgcggaccacagccctgaccaatgcctgtgcagaccactctgaccagcgtgtggtgtacctggagcatgtggtagtccgaatctctatctcacatccacgacggggtgacctccagatccacctgatttctccctctggaaccaagtctcaacttttggcaaagagattgctggatttttccaatgaggggttcacgaactgggagttcatgactgtccactgctggggagaaaaggctgaaggtgaatggaccctggaagtccaggatataccatcgcaggtccgcaacccagagaaacaaggaaagttgaaagaatggagcctcattttatatggcactgcagagcacccataccgcaccttcagctcccaccagtctcgctcacggatgctggagctttcagtcccggaacaggagcctctcaaggctgagggaccaccaccgcaggcagagactccagaagaagaggaagagtacacaggtgtgtgccatccagagtgtggtgataaaggctgcgatggtcccagtgcagaccagtgcttgaactgcgtccacttcagcctgggaaactccaagacaaacaggaagtgtgtgagcgagtgccccttgggctactttggggacacagcagcaagacgctgccgtcgatgccataagggatgtgagacatgcacgggcaggagcccaacacagtgcctgtcttgtcgccgtgggttctatcaccaccaggaaacgaacacatgtgtgaccctgtgtcctgccggactttatgctgatgaaagtcagagactctgcctcaggtgccacccgagctgtcagaagtgtgtggatgaacctgagaagtcgactgtgtgcaaggagggattcagcctcgcacggggcagctgcattccggactgtgaaccaggtacctacttcgattctgagctcatcagatgtggggaatgccatcacacctgccggacctgcgtggggcccagcagagaagaatgtattcactgtgcaaaaagcttccacttccaagactggaaatgtgtgccggcctgtggtgagggcttctacccggaggagatgcctggcttaccccacaaagtgtgtcgaagatgtgatgaaaactgcctgagctgcgagggctccagcaggaactgcagcagatgtaaagctggcttcacgcagctggggacctcctgcatcaccaaccacacgtgcagtaacgccgatgagaccttctgcgagatggtaaagtccaaccggctctgtgaacggaagctcttcatccagttttgttgccgcacctgcctcctggctgggtagggcgggcgccagctgccacagagggcagggtcctcctgtctgcccttttgcccagctaccttcctacagatggccagccatagcccattccttggggtggccctgagtctgacagctgtgccctcccccccccagagctgggtcccactgcagcatctctgagcacctgaactaggtggaggtggcccttaaggataaggctaaatcggcaaaaatccccctgaactctgcttgctggctgcagtctaaagctggactcgaaataggaacagagtgaattatgagactcatgcctgcagcttgggagtggcttctgggaccctagtttactgaaacttcaagaccaaagcagaaaaagagagatgcctggcatcccatcaagtcctcctcccacacattcgtgtgaccgtgacagatctcaccgagttggctggcaggaccccatgctgtcctcacctataatgaagggcctcgcttcctccccatgcatcactggccaccaaacagcctgagggatggtttgatgagactgtaaataaaataggtttcagggcataagatgtatgaccactggggatagaacctatgtctacacagctccttccgaaactacagccccctgactggaaggtccggcaccagactgaagtaggtctactcatcctctcctcagcattctcctctgagtgagctgagctgtccaagtgactgttcaacctgtgtcccagggcctcctgggcctgagccaccagtcatctacagatacagagcctgtggaggagggtccaaaggagctacttaaggctagccgaaagacctctaatggccaagcagttcctccttatgcaaagccagccccaaatcactaatcgccagccctccatggcacacaactgcttctcaagtgcatttggcctccacactcaggactctgttctcgggtggacactgctctggcccagtatagtacaagcctacgttgatagagctggattgatttttctgccaagcctgtgtgggcattttataagctacgtgttctaatttttaccgatgttaattattttgacaaatatttcatatattttcattgaaatgcgcagatctgcttggtccagttccctttaacgtgggaataacatttgccttaaatttttccaacctcgtctctctccatatggtcctgctctcctctctgaatataatgtgttttgtcttgtcacctgtaagtggcaaggactcagctgttgtctgttgaatccacaacttcaaataagaaatcagtgaagcaaatctaatgttaaccctgag

SEQ ID NO: 58 - DNA, 1687 bp, Rattus norvegicus
  Genbank Accession No. NM_013011
cccagagactgccgagccgggtccgtgtgccgccacccactccggacacagaatatccagttatggataaaaatgagctggtgcagaaggccaagctggccgagcaggcagagcgatacgatgacatggcagcctgcatgaagtctgtcactgagcaaggagccgagctgtctaacgaggagaggaaccttctctctgttgcttataaaaacgttgtaggagcccgtaggtcatcttggagggtcgtctcgagtattgagcagaagacggaaggtgctgagaaaaagcagcagatggctcgagaatacagagagaagatcgagatggagctgagggacatctgcaacgacgtactgtctcttttggaaaagttcttgatccccaatgcttcgcagccagaaagcaaagtcttctatttgaaaatgaagggtgactactaccgctacttggctgaggttgctgctggtgatgacaagaaaggaattgtggaccagtcacagcaagcataccaagaagcatttgaaatcagcaaaaaggagatgcagccgacacaccccatcagactgggtctggccctcaacttctctgtgttctactatgagatcctgaactccccagagaaagcctgctctcttgcaaaaacagcttttgatgaagccattgctgaacttgatacattaagtgaagagtcgtacaaagacagcacgctaataatgcagttactgagagacaacttgacattgtggacatcggatacccaaggagacgaagcagaagcgggagaaggaggggaaaattaaccggccttccaacctttgtctgcctcattctaaaatttacacagtagaccatttgtcatccatgctgtcccacagatagtttttttgtttacgatttatgacaggtttatgttacttctatttgaatttctatatttcccatgtggttttatgttttaatattaggggagtagagccagttaactttagggagttactcgttttcatcttgaggtggccaatatgggatgtggaatttttacatgagttacacatgtttggcatagttagtacttttggtccattgtggcttcagaagggccagtgttcaaactgcttccatgtctaagcaaagaaaactgcctacatattggtgtgtgctggcggggaataaacaggataatgggtccagtcatgagtgtagtctgtgtgggtactgtaaggcttggagcacttgtgaggctgggacacgaacaccctgtggatgcacgctaagaccgtgtgtctgcgtgcacacccttgaccacagctccagaagttgtctgtagacaaagttgtgacccaatttactctgataagggcagaaacggttcacattccattatttgtaaagttacctgctgtttgctttcattatttttgctacacattttatttgtatttaaatgttttaggcaatctaagaacaaatgtaaaagtaaagatgcagtacaaacgagttgcttggtgttcccggctccatgcggatcaagcacagcggtaaacaaaatcccatgtatttaactttttttttttaagttttttgttttgttttgtttttgcttttgtgattttttttctctttttgatacttgcctaacatgcatgtgctgtaaaaatagttaacagggaaataacttgagatgacg

SEQ ID NO: 59 - DNA, 743 bp, Rattus norvegicus
  Genbank Accession No. NM_013018
tcggcttcttctggggcccggtcgccagcgcagtcgccacggtccgtgtcgccagcttgtctcagtttagagagggcaagatggcctcagccacagactctcgatatgggcagaaggagtcctcagaccagaacttcgactatatgttcaagatcctgatcattggtaacagcagtgtgggcaaaacctcattccttttccgctacgcagacgactcttttactccagcctttgtcagcactgtgggcatagacttcaaggtcaaaaccatctaccgcaatgacaagaggatcaagctgcagatctgggacacagcaggacaagagcggtaccgaaccatcaccacagcctactaccggggcgccatgggcttcattctaatgtatgacatcaccaatgaggagtccttcaatgcagtgcaggactggtccactcagatcaaaacttactcatgggacaatgcccaggtgctgctggtggggaacaagtgcgacatggaggacgagcgagtggtgtcctcagaacgaggccggcagctggccgaccacctgggctttgagttctttgaggccagcgccaaggacaacattaatgtcaagcagacctttgaacgtctggtggacgtgatctgtgagaagatgtcggagtccctagatactgcagaccttgcagtcacgggtgccaagcagggcccacagctcaccgaccagcaggcaccacctcatcaggattgcgcctgctga

SEQ ID NO: 60 - DNA, 5099 bp, Rattus norvegicus
  Genbank Accession No. NM_013039
cccttgtgacaggtcagtcttacgagaatatggtaactgagatcatgtcaatgggctatgaacgagaacaagtaattgcagccctgagagccagcttcaacaaccctgatagagctgtggaatatcttctaatgggaatccctggagactgaggagttccagtactcacagcctgtggaggaggatcaaccacggcctgactttcgcggccgccgcgggaggcgcgcggagccggagccgagcccgtgcgcgcgccaccatgcctttggccttctgcggcaccgagaaccactcggccgcctaccgggtggaccaaggcgtcctcaacaacggctgcttcgtggacgcgctcaatgtggtgccacatgtctttctgctcttcatcaccttccccatcctcttcatcggatggggcagccagagctccaaggtgcacattcaccacagcacctggctccatttcccggggcacaacctgcgctggatcctgaccttcatactgctcttcgtcctcgtgtgtgagatcgctgagggtatcctgtctgacggggtgacagaatcccgccacctccacttatacatgccagctgggatggcattcatggctgccatcacctctgtggtctactaccataacattgagacctctaactttcccaagctgctgattgctctgctcatctactggaccctggccttcatcacgaagaccatcaagttcgtcaagttctacgaccacgccattggcttctctcagctgcgcttctgcctcacggggcttctggtgatcctctacgggatgctgctgcttgtggaggtcaatgtcatccgggtgaggagatacgtcttcttcaagacaccaagggaagtaaagccccccgaggacctacaggacctgggtgtgcgctttctgcagcccttcgttaacctgctatcaaaggggacctactggtggatgaatgccttcatcaagactgctcacaagaagcccatcgacctgcgggccatcgggaagctgcccattgccatgagagccctcaccaactaccagcgactctgcttggccttcgatgcccaggcgcggaaggacacacagagccagcagggtgcccgggccatctggagggctctctgtcatgcctttgggagacggctggtcctcagcagcacattccgtatcctggccgacctcctgggctttgctgggccactctgcatcttcgggatcgtggaccacctcgggaaggagaaccacgtcttccagcccaagacacagtttcttggagtttactttgtctcatcccaagagttcctcggcaatgcctatgtcttggctgttcttctgttccttgccctcctgctgcaaaggacctttctacaagcctcgtactacgttgccattgaaactgggatcaacctgagaggagcaatccagaccaagatttacaataagatcatgcacttgtctacttccaacctgtccatgggggaaatgactgctgggcagatctgcaacctggtggccatcgacaccaaccagctcatgtggtttttcttcttatgcccaaacctctgggctatgccggtacagatcattgtgggcgtgatcctcctctactacatccttggggtcagcgccttgattggagcggctgtcatcattctgctggctcctgtacagtactttgtggccaccaagctgtcccaggcacagcggacgaccctggaatattccaatgagaggctgaagcagaccaatgagatgctccggggcatcaagttgctcaagctctatgcgtgggagaacatcttctgctccagggtggagaagacacgcaggaaggaaatgaccagcctcagggccttcgctgtctacacctccatctccatcttcatgaacacagctatccccatcgctgctgtcctcatcaccttcgtgggccacgtcagcttcttcaaagagtcggacttctcgccctcggtggcctttgcctctctctctctcttccacatcctggtcacaccgctgttcctgctgtctagtgtggttcggtccactgtcaaggccctggtgagcgtgcaaaagctgagtgagttcctgtccagtgcagagatccgtgaggaacagtgtgccccccgagagcccgcaccccaaggccaagcgggcaagtaccaggcggtgcccctcaaggtcgtaaaccgcaagcgcccagcccgagaagaagtccgggacctcttgggcccactgcagaggctgactcccagcacggatggagacgctgacaacttctgtgtccagatcatcggaggcttcttcacctggacccctgatggaatccccaccctgtccaacatcaccatccgtatcccccgaggtcagctgaccatgatcgtggggcaggtgggctgtggcaagtcctcgctccttctggccaccctgggggagatgcagaaggtctctggagctgtcttctggaacagccttccagacagcgagggagaagaccccagcaacccagagcgggagacagcggccgattcggatgccaggagcagaggccctgtggcttacgcatctcagaaaccatggctgctaaatgccactgtggaggagaacatcaccttcgagagtcccttcaataagcaacggtacaagatggtcatcgaagcctgctccctgcagccagacatagacatcctgccccatggagaccagactcagattggggaacggggcatcaacttgtctggtggtcagcgtccagggatcagtgtagcccgagccctctaccagcacaccaatgttgtctttttggatgaccctttctcggctctggatgtccatctgagtgaccacctaatgcaggctggcatcctcgagctgctccgggatgacaagaggacagtggtcttggtgacccacaagctacagtacctgcctcatgctgactggatcattgctatgaaggatggcaccattcagagggaggggacactcaaggacttccagaggtctgagtgccagctctttgagcattggaagaccctcatgaaccggcaggaccaagagctggagaaggagacagtcatggagagaaaagccccagagccatctcagggcctgccccgtgccatgtcctcaagagatggccttctgctggatgaggatgaggaggaagaggaggcagccgagagcgaggaagatgacaacttatcctctgtgctgcatcagcgagccaagatcccatggcgagcctgcaccaagtatttgtcctctgctggcatcctgctcctgtccctgcttgtcttctcccagctgctcaagcacatggtcttggtggccattgactactggctggccaagtggacggacagtgccctggtcctgagccccgccgccaggaactgctccctcagccaggaatgtgccctggaccaatctgtctatgccatggtattcaccgtgctctgcagcctgggtatcgcgctgtgccttgtcacctctgtcactgtggagtggacgggactgaaggtggccaagaggctgcatcgcagcctgctcaaccgtatcatcctggctcccatgaggttctttgagaccacgcccctggggagtatcctgaacagattttcatctgactgtaacaccattgaccagcatatcccgtccacgctggagtgcctgagcagatccaccttactctgtgtctccgccctggctgtcatctcctacgtcacgcctgtgttcctagtggccctcttacccctcgccgtcgtgtgctacttcatccagaagtacttccgagtggcgtccagggacctgcagcagctggacgacacaacacagctccctctgctctcacactttgctgaaactgtggaaggactcaccaccatccgtgccttcaggtacgaggcccggttccagcagaagctcctagagtacaccgactccaacaacattgcctctctcttcctcacagcagccaacaggtggctggaagtccgcatggagtacatcggagcatgcgtggtactcatcgccgctgccacctccatctccaactccctacacagggagctctcagccggcctagtaggcctgggcctcacctatgccttgatggtctccaactacctcaactggatggtgaggaacctggcagacatggagatccaactgggagctgtgaagggtatccacacactcctgaaaactgaggcagagagctatgaggggctcctggcaccatcgctgatccccaagaactggccagaccaagggaagatccaaattcaaaacctgagtgtacgctatgacagctccctgaagcccgtgctgaagcacgtcaacgccctcatctccccaggacagaagattgggatctgcggccgcacaggcagtggaaaatcctccttctctctcgcctttttccgaatggtggatatgtttgaagggcgtatcatcatcgatggcattgacatcgccaagctgccgctgcacacgctccgctcacgcctgtctatcatcctacaggaccctgttctcttcagtggtaccatcagattcaacctggacccagagaagaaatgctcagacagcacgctgtgggaggctctggagatcgctcagctgaagctggtggtgaaggccctgccaggaggcctggatgccatcatcacggaaggaggggagaattttagccagggccagaggcagctgttctgcctggcccgggcctttgtgaggaagaccagcatcttcatcatggatgaagcaactgcctccatcgacatggctacggaaaatatcctccagaaggtggtgatgacagccttcgcagaccgcaccgtggtcaccatcgcgcaccgcgtgcacaccatcctgagtgcagacctagtgatggtcctgaagaggggcgcgatcctggagttcgacaagccggaaaagcttctcagccagaaggacagcgtctttgcctcctttgtccgcgcggacaaatgaccagccagcgccaaagtgccaccccacacctcacctgcttgccatggatttcttactgtaaatcacttgtaaataaagaaactaattctttgct

SEQ ID NO: 61 - DNA, 6628 bp, Rattus norvegicus
  Genbank Accession No. NM_013040
agcagctggcctcccaccaccctaaaaataatccactcgccgctgtctgctgacccgggaggaaaacttgtcatcccatggagtgtgtgagctcctcggcttgctccagagagatccccaaccgctttgaggagtcagtgactgagttctgtggacttgtttgaaatttacatcttcagactgtgcgcaggcggttggaaggtagatcaagtgcaccagtagggggactaagttcctgagccaaagtcaaggctaatcaactaagaagaaatgagcctttccttctgtggtaacaacatctcctcctacaacatctaccatggtgttctccaaaacccctgctttgtggacgcactcaacctggtccctcacgtcttcctgctgtttatcacctttccgatcctgttcattggatgggggagccaaagctcaaaagtgcaaattcatcacaacacatggcttcattttcctggacacaacctgagatggattctgacgtttgcactcctgtttgtgcatgtctgcgagatagcagaaggcattgtttcagactcgcaacgggcgtccaggcatctccaccttttcatgccggctgtgatgggatttgtcgccaccaccacatccattgtgtattaccacaacattgaaacatcaaacttccctaaattacttttagctttattcctgtactgggtcatggccttcattacaaagacaataaagttggtcaaatactggcagttggggtggggaatgtcagacctgcgcttctgcatcacgggagtgatggtcatcttgaatggactgctgatggctgtggagatcaatgtcatccgggtccgaagatatgttttcttcatgaatcctcagaaagtgaagcctccagaggacctccaggacctgggcgtgaggttcctccagccgtttgtgaatttgctgtccaaagctacttactggtggatgaacacgcttatcatatcagctcacaggaaacctattgatctgaaggcgatcggaaagttgccgatagcaatgagggcggtgacgaattatgtttgcttgaaggaggcctacgaagagcagaagaaaaaggctgcggatcatccgaatcggactccctccatatggctggccatgtacagggcttttgggagaccgatcctgctgagcagcacgttccgctacttggctgacttgctgggctttgccggccctctttgtatttccggaatcgtccagcgtgtgaatgaaccgaagaataacacgacgagattttcagagacactctcatcaaaggagtttctggaaaatgcccatgtgctggctgtcctgctcttcctggccctcatcctgcaaagaacatttttgcaggcttcgtactatgtgaccatagagaccggcatcaacctgcgtggggctctgctggctatgatctacaacaaaatccttcgactgtctacttctaacctatccatgggcgagatgaccctgggacagatcaacaacttggttgccatagaaaccaatcagctcatgtggttcttgttcctgtgtcccaatctgtgggccatgcccgttcagatcataatgggggtgatcctgctctataatctgcttgggtcaagcgcactggtaggcgcggcggtcatcgtgctcctcgcaccgattcagtacttcatcgccacgaagctggcggaggctcagaagagcactctggattattccaccgagaggctgaagaagacaaacgagatactgaaaggcatcaagctccttaagctgtatgcctgggagcacattttctgcaagagcgtggaagagactagaatgaaggagctctccagcctcaaaaccttcgcgctctacacgtcgctttccatcttcatgaacgcagccattcccatcgcagccgttcttgcaacatttgtgacccatgcctatgccagtggcaacaacctgaaacccgcagaggcctttgcctctctgtctctcttccacatcctcgtcacaccgctcttcctgctgtccacggtggtcagattcgcagtgaaagccatcatcagcgttcagaagctgaatgagtttctcttgagcgatgagattggcgaggacagctggaggactggggaggggacgctgccttttgagtcctgtaagaagcacaccggagtgcaatcaaaaccgataaacaggaagcagcctggaaggtaccacctggacaactacgagcaggcgcggcgtcttcggcctgctgagactgaagatgttgccataaaggtgacgaacggatacttctcatggggcagtggtttagccacattatccaatattgacattcgaattccaacaggtcagctaaccatgattgtgggtcaggtgggttgtggcaaatcgtctctcctccttgccatccttggtgagatgcagaccctggaaggaaaagtttactggaacaatgtaaatgaatctgagccttcttttgaagcaacccgaagcagaagcaggtactctgtggcttatgctgcccagaagccttggctcctcaatgctacggtcgaggaaaacatcacttttggaagttctttcaacagacagaggtacaaggctgtcaccgatgcctgctctctgcagccagacattgatttgttaccctttggagaccaaactgaaattggagagaggggtatcaacctgagtgggggtcagaggcagagaatctgcgtggcccgggcactctaccagaacaccaatattgtcttcttggacgatccattctccgctctggacatccacctgagcgaccacttgatgcaggaagggatcctgaagtttctccaggacgacaagaggacggtcgtccttgtgactcacaaactacagtacctgacgcacgcggactggatcatagccatgaaggatgggagtgtgttaagggaagggactttgaaagacatccagaccaaagacgtggagctctatgaacactggaaaaccctcatgaatcggcaagatcaggaattagaaaaggacatggaagccgaccaaacaacgctggagaggaagactctccgaagagctatgtactcaagggaggccaaagcacagatggaggatgaagatgaagaggaggaggaggaggaagatgaggacgacaacatgtcaactgtaatgaggctcaggacgaagatgccctggaagacctgttggtggtacctcacttcaggagggtttttcctgctcttcctcatgatcttctctaagcttttgaagcactctgtgatcgtggccatcgactactggctagctacgtggacctccgagtacagtataaacgacccagggaaagctgaccagaccttctatgtggctgggttcagcatcctctgtggagcgggcattttcctttgcctcgtcacctccctcactgtagaatggatgggtctcaccgccgccaagaacctccaccacaatctcctcaataagataattctgggcccaataaggttctttgataccacgcccctgggactgatcctcaatcggttttctgctgataccaacatcatcgaccaacatatccctccgaccttggagtcgctgacccgctctaccctgctctgcctgtcggctattgggatgatctcctatgctacacccgtgtttctcatcgctcttgcgcccctgggcgtcgccttttatttcatccagaaatacttccgggttgcctctaaggatctccaggaactcgatgacagcacccagctccccctgctttgtcacttctcagaaacagctgaagggcttaccactatccgggccttcaggcatgaaaccagattcaagcaacgcatgctggagctgacagacacaaacaacattgcctacttatttctctccgcagccaacagatggctggaggtcaggacggactacctgggagcttgcattgttctgacggcctccattgcatccatcagtggctcttccaactctggactagtgggcttgggccttctgtatgccctcacgataaccaattacctgaattgggttgtaaggaacttggccgacctcgaagtccagatgggcgcagtgaagaaagtgaacagtttcttaactatggagtctgagaactatgaaggcaccatggatccttctcaagtcccagagcattggccacaggaaggtgagatcaagattcacgatctatgcgtcagatatgaaaataacctgaagcccgttctgaaacatgtcaaggcttacatcaagcctgggcagaaggtgggcatctgtggtcgcaccggtagtgggaagtcctctctatctctggctttcttcagaatggtcgacatatttgatggaaagatagtcattgatggaatagacatttccaagctgcccttgcacacgctccgctctagactgtccatcattctccaggacccaatcctgttcagcggctctatcagatttaacttggatcctgaatgcaagtgcacagacgacaggctctgggaggctctggaaattgctcagttgaagaatatggtcaaatctctgccaggaggcctagacgccactgtcaccgaaggtggtgagaacttcagcgttggacagagacagctgttctgcctggccagggcctttgttcgaaagagcagcatactcattatggatgaggccacggcctccatcgacatggccacggaaaacattttgcagaaagtagtcatgacagcctttgcggatcgcacggttgtaaccatagctcatcgggttcacaccattctgactgctgacctggtcattgtgatgaagagaggaaacattttggaatacgacaccccggaaagcctcttggcccaggaggatggagtgttcgcctcgttcgttcgtgcggacatgtgacaggattacatcacaacagcacctgtgtctcgatgcctaccgtcgcccaccagagggttcccccaactttgcctcggaagggtggcgccggaaacttcgacagacttctgtatggaaagtagagatttctgtttcctgttttggtctgagggacactccctgtaggttcatcgtgggtgttgtactgtgatcaggccacactggaaaggtagcctatgctaaaacatgccagcgaccttaaggggtaaatctgtcgatgtctgtcaagcactggagctgaaatgaggcgtctgcgctaccacactctcattaggaagactagcactgccctgctgttgatgaagaaaattcattttctaacaaaatactcacgttcatgatccataggagagtcttttctgtgcatttaacattgttgatatttccttttaacttttccccttttaactcatttcctgtcaccacgaagctatcatatttagtacctctataaagccgacccctcacaagagaaagatcatgaaaagagattgaatatttgaaaatattatttgtttccatttgcctccatccaataaggaggaagttcaagttagcttcagtccttcagcaatgggccacctaaactaagctttctagagtttaattctttatcagccaaacaatggctctgaaccctgaaatgctatattatctagggcccaaaagaatatagatgaatggccttatctgtcacacacacacacacacacacacacacacacacacacacacacacacacatatacatacacatcttcatgccatatcttggctgtatgctaatcttggcatgtgcacattcctcgaaggtaccagatatcccctaccctacatctctgtgggaagatagaaatagttctcactctgaatttacacaggtagcaagtgtttattttcacttgggcaaatttcagtggcagacattgatgtcacacatgtggccattggtcctgttctaatttatagagtgtaccagaagtctatatgatattagtgtcacatttcatttaavtgcccattaataaagccaaactgactgaagttcacttccctgttatccagcttccacagtttctgtaacctttaaccatcagatataagcagctgctcaattccatatgagggtctccacagaaaatagatgtccatcgcccaccgttcctgtagtcatatggcgttgtttattctgtgtcaagacttatagttcttgtgcatcgagatatttcaaggtgcctttatggatatagaacgtaatgtaagaaaaacgttcatagagatatacagaaacggcccaggttacttagcctaaatagtcaccttttcttccatatcaaaaacttcattagaaaaaaataatagtattatttgcagaaagctagtaggtcacagctattagcaatgagttcaaccgcaaaagtacttcataagagaatcgactaatctactaaaatattgctggtgctgcagaaggttctgctggggctgatacccatgacgtttgttgtcagtcagtgtctccttctctcctagaaatggcattcatctacagaagtagctccctgctgctgtagcccactacgccatcctgtgcaaaagtgactttcgtttcctcgaaacttttacttacttgatttgcaaaaaacaaacaaaaaacaaacaaacaaacaaaaaaaaaaaa

SEQ ID NO: 62 - DNA, 1666 bp, Rattus norvegicus
  Genbank Accession No. NM_013043
cggcagccgagtcggattgagctgctgcagacgccaggccactccagccagcactgccgttttcacgccccggctgcagacagctaggaggctttatctagtttgaaccaggctgctggagctcgctccttccctctctttttttccacgaggctgtttttttatttggctgcaattgcatgaaatcccaatggtgtagaccagtggcgatggatctaggagtttaccaactgagacatttttcaatttctttcttgtcgtctttgctgggaactgaaaacgcttccgtgagacttgacaatagctctggtgcaagtgtggtagctatcgacaacaaaatagagcaagctatggatctggtgaaaagccatttgatgtatgcagttagagaggaagtggaggttctgaaggagcagatcaaagaactaatagagaaaaactcccaactggagcaggagaacaatctgttgaagacactggccagtccggagcagctcgcccagtttcaggcccagctgcagactggctcccctccggctaccacgcagccacaggggaccacacagccccctgcacagccagcgtcccagggctcaggatcaaccgcatagcctgctatgccccaacagaactggctgctgctgtctgaactgaacagaccgaagagatgtgctagtgagaagccgcctccagtcacccatttcattgctgtctgcgaaagagacgtgagactcacacatgctgttctcgctttctccccagtattaagcactcatatgcttttggcttgaagaaatatactagttgagtgaattaaaggttaaacagagagtgagcatggatgtaccctgtgcaacgtggcagatgtctgaggaatggtttgattgacgctgaggaggagctctgtgccttttcaaccctccccagccgcccactctactcccaagctctggggctcgcctgcatggggctcagaaggtgggctgctcctggattttgtgttctcctctccttcccttcaaagaatttgagaggccagaaacgagactgcaaagggggggatgcagtccttttacaaaaccgacaactgtcaccaaagcttataaaacaggacagtactgtccctcttttctgaaacatcagaagacacaaaactgttagtgacacaacggtgacaggtagctgggacctaggctatcttattatgaaggttgttttgcttgttgtatatttgtgtatgtagtgtaacgaatttgtacaatagaggaccgtaactactgttaggttgtacagattgaagtttagatgttccattggctgtctgaaaaggtgtggattgtccttcctagagagatctacttaaaaactgcttcgtgacaaaaaccacacctgaagaaattttaagaatttggcacagttagtcactttgtgtcacccggaatctagctgctgagtcttgcaaagtaaaccccctgttgactgatgtcagttgagctagtgaatgaatagatggagaaacgtcagtcagttgctgaggaagtggatttcccagtaggggtttctgcagctcacctgtatagtcctgcgcatgttccccacacagaacccactgtatttacctgttctacttgtcacctttcaataaagcatatcaaatgttgatacc

SEQ ID NO: 63 - DNA, 768 bp, Rattus norvegicus
  Genbank Accession No. NM_013046
atgccgggaccttggttgctgctggctctggctttgatcttcaccctaactggtatccctgaatcctgcgccttgccggaggcagcccaggaggaaggtgcagtgactcctgaccttcctggcctggagaatgttcaggtccggccagaacgtcgattcttgtggaaagacctccagcgggtgagaggggacctcggtgctgccttagactcctggatcacaaaacgccagcatccaggcaaaagggaggaggaggaaaaagacattgaagctgaagagaggggagacttgggagaagggggagcctggagactccacaaacgacagcaccccggccgacgtgccaaccaggacaagtattcatgggcagatgaggaggacagtgactggatgccacggtcctggttaccagatttctttctggattcctggttctcagatgtcccccaagtcaagcggcagcaccctggcaggcgatccttcccctggatggagtctgatgtcaccaagaggcaacatccaggccggaggttcatagatcccgagctccaaagaagctgggaagaaaaagagggagagggtgtcttaatgcctgagaaacgccagcatcctggcaaaagggcattgggtcatccctgtgggccccaggggacttgtggtcaaacaggcctgctccagcttctaggtgacctgagcaggggtcaggagaccctggtgaagcaaagcccacaagtggaaccctgggacaaggaacctctggaggagtaa

SEQ ID NO: 64 - DNA, 1150 bp, Rattus norvegicus
  Genbank Accession No. NM_013069
gcagcagcagcagcaccagcagcacttgggggaaaagctagaggctagagtcatggatgaccagcgcgacctcatctctaaccatgagcagctgcccatcctgggccagcgtgctagagccccagaaagcaattgcaaccgtggagtcctgtacaccagtgtctctgtcctggtggctctgctcttggctgggcaggccaccactgcttacttcctgtaccagcagcagggccgcctggacaagctgaccgtcacctcccagaacctgcaactggagaaccttcgcatgaagcttccgaaatctgccaaacctgtgagcccgatgcgcatggctactcccttgctgatgcgcccactgtccatggataacatgctccaagcgcccgtgaagaatgttaccaagtatggcaacatgacccaggaccacgtgatgcacctgcttacgaagtctggacccgtgaactacccacagctgaaggggagcttcccggagaatctgaagcaccttaagaactctatgaatggtctggactggaaggtctttgagagctggatgaaacagtggctgttgtttgaaatgagcaagaactccctggaggagaagcagcccacccagactccacctaaagagccactggacatggaagacccatcttctggcctgggagtgaccaagcaggatatgggccaaatgttcttgtgaagacagaagccagctctgcacggcggcacgtcccctgctcctcagcccttcttacactccctaacatcacacccattccgtcttcctgcacctgggcttgagactggtatctgcttcaccgtccctgacacaacaaatgaaaccggaacagaatgagaacactggagggagggccttgctgcctacccccatctaaaggacccccatttctgacccattagcagtctttaatgtggggctctgagatctaggcccactgacagggataggggatgccctacccttaatctaggctggatacatttgctgtcttctcaaggaagaggccaagccctcccagcaacccttcctcatgtcctgccgacgcccctgggatccctgctcagccaagcttgtcagcagcctgtaggaccatggttcacgtgacaataaaaggtagaaggtaaa

SEQ ID NO: 65 - DNA, 607 bp, Rattus norvegicus
  Genbank Accession No. NM_013086
ggatccgtatgaccatggaaacagttgaatcacagcaggatcgaagtgtaacacattctgtggcagagcatagctccttgcatatgcagactggccaaatttctgtccctactctagctcaggatgaggagactgaccttgccccaagtcacatggctgctgccacaggtgacatgccaacttaccagatccgagctcctactactgctttgccacaaggtgtggtgatggctgcctcaccagggagtctgtacagtccccagcaactagcagaagaagcaactcgaaagcgggagctgaggctgatgaaaaacagggaagctgcccgggagtgtcgcaggaagaagaaagaatatgtcaaatgtcttgaaaatcgtgtggctgtgcttgaaaatcaaaacaagaccctcattgaggaactcaaggccctcaaagacctttattgccataaagcagagtaactgtgtttgacttggacctggttgactgtgaactctaatcggggcaggcgatgcagcatcctcgtaatggccatatggacttgtagatgggtctcttaacccttgcttaagaatacagtctgctgtagagtgtgaattgggaattc

SEQ ID NO: 66 - DNA, 2130 bp, Rattus norvegicus
  Genbank Accession No. NM_013091
ttttctccgagttttctgaactctggctcatgatcgggcttactggatacgagaatcctggaggaccgtaccctgatttccatctacctctgactttgagcctttctaacccggggctcacgctgccaacacccgggccacctggtccgatcgtcttacttcattcaccagcgttgccaattgctgccctgtccccagccccaatgggggagtgagagaggccactgccggccggacatgggtctccccatcgtgcctggcctgctgctgtcactggtgctcctggctctgctgatggggatacacccatcaggggtcaccggactggttccttctcttggtgaccgggagaagagggataatttgtgtccccagggaaagtatgcccatccaaagaataattccatctgctgcaccaagtgccacaaaggaacctacttggtgagtgactgtccaagcccagggcaggaaacagtctgcgaggtgtgtgataaaggcacctttacagcttcgcagaaccacgtcagacagtgtctcagttgcaagacatgtcggaaagaaatgttccaggtggagatttctccttgcaaagctgacatggacaccgtgtgtggctgcaagaagaaccaattccagcgctacctgagtgagacgcatttccagtgtgtggactgcagcccctgcttcaatggcaccgtgacaatcccctgtaaggagaaacagaacaccgtgtgtaactgccacgcaggattctttctaagcggaaatgagtgcaccccttgcagccactgcaagaaaaatcaggaatgtatgaagctgtgcctacctccagttgcaaatgtcacaaacccccaggactcaggtactgccgtgctgttgcctctggttatcttcctaggtctttgccttttattctttatctgcatcagtctactgtgccgatatccccagtggaggcccagggtctactccatcatttgtagggattcagctcctgtcaaagaggtggagggtgaaggaattgttactaagcccctaactccagcctctatcccagccttcagccccaaccccggcttcaaccccactctgggcttcagcaccaccccacgcttcagtcatcctgtctccagtacccccatcagccccgtcttcggtcctagtaactggcacaacttcgtgccacctgtaagagaggtggtcccaacccagggtgctgaccctctcctctacggatccctcaaccctgtgccaatccccgcccctgttcggaaatgggaagacgtcgtcgcggcccagccacaacggcttgacactgcagaccctgcgatgctgtatgctgtggtggatggcgtgcctccgacacgctggaaggagttcatgcggctcctggggctgagcgagcacgagatcgagcggctggagctgcagaacgggcgttgcctccgcgaggctcattacagcatgctggaagcctggcggcgccgcacaccgcgacacgaggccacgctggacgtagtgggccgcgtgctttgcgacatgaacctgcgtggctgcctggagaacatccgcgagactctagaaagccctgcccactcgtccacgacccacctcccgcgataaggccacacccccacctcaggaacgggactcgaaggaccatcctgctagatgccctgcttccctgtgaacctcctctttggtcctctagggggcaggctcgatctggcaggctcgatctggcagccacttccttggtgctaccgacttggtgtacatagcttttcccagctgccgaggacagcctgtgccagccacttgtgcatggcagggaagtgtgccatctgctcccagacagctgagggtgccaaaagccaggagaggtgattgtggagaaaaagcacaatctatctgatacccacttgggatgcaaggacccaaacaaagcttctcagggcctcctcagttgatttctgggcccttttcacagtagataaaacagtctttgtattgattatatcacactaatggatgaacggttgaactccctaaggtaggggcaagcacagaacagtggggtctccagctggagcccccgactcttgtaaatacactaaaaatctaaaagtg

SEQ ID NO: 67 - DNA, 556 bp, Rattus norvegicus
  Genbank Accession No. NM_013096
acattctccttctgatagactcaggaagcaatcatggtgctctctgcagatgacaaaaccaacatcaagaactgctgggggaagattggtggccatggtggtgaatatggcgaggaggccctacagaggatgttcgctgccttccccaccaccaagacctacttctctcacattgatgtaagccccggctctgcccaggtcaaggctcacggcaagaaggttgctgatgccttggccaaagctgcagaccacgtcgaagacctgcctggtgccctgtccactctgagcgacctgcatgcccacaaactgcgtgtggatcctgtcaacttcaagttcctgagccactgcctgctggtgaccttggcttgccaccaccctggagatttcacacccgccatgcacgcctctctggacaaattccttgcctctgtgagcactgtgctgacctccaagtaccgttaagccgcctcctgccgggcttgccttctgaccaggcccttcttccctcccttgcacctatacctcttggtctttgaataaagcctgagtaggaagc

SEQ ID NO: 68 - DNA, 2237 bp, Rattus norvegicus
  Genbank Accession No. NM_013098
gccagcttcctgaggtaccaaggaggaaggatggaggaaagaatgaacgtgctccacgactttgggatccagtcgactcgctacctccaagtgaattacgaagactcccaggactggtttgtcttggtgtctgtgatcgctgacctcaggaacgccttctatgtcctctttcccatctggttccacattcaagagactgtgggcatcaatctcctctgggtggcagtggttggagactggttcaacctcgtctttaagtggattctttttggacagcgcccgtattggtgggtcctggacactgactattacagcaacagctccgtgcctctgataaaacagttccccgtcacctgtgagactggaccagggagtccctcgggccatgccatgggcacagcaggtgtatactacgttatggttacttctactctcgctatctttcgtggaaagaaaaagtcaacgtatggattccggtgcttgaatgtcgtcttgtggttgggatactgggctgtgcagctgaacgtctgtctgtcccggatctaccttgcggctcactttccccatcaggtggtggctggagtcttgtcaggcattgctgtggctgaaactttcagccacatccggggcatctacaatgccagcctccagaggtactgtctcatcaccttcttcctgtttggtttcgcacttggattttacctgctgctaaaggggctaggggtggacctcctgtggactttggagaaggccaagagatggtgtgagcgccccgagtgggtccaccttgacactacaccctttgccagcctcttcaaaaacctggggaccctcttggggttggggctggccctcaactccagcatgtaccgcaagagctgcaaaggagaactgcgcaagtcgctcccattccgtttggcctgcatcgtggcctccttgggcctgctgcatctctttgactcgctgaagcccccgtcccagattgagtcgatcttctacatcttgtctttctgcaagagtgcgaccgtcccctttgcatctgtcagtcttatcccctactgcctagcccggctcctgggacagacacacaagaagtctttgtaaagcgttaagtctctgacacaagtcagcggccgtgcaaaggactaggagcaacccaagccttgtgcaacccagtgtggggccagaggtgttcacagccaccctggtagccctgtctttctttgccatcgtaaccaaaaaggtgaatttttaaaagctaacagggctgtttgaggaaagcgtgaatgctggaagatgtttccctgatgaatcacttccggtctcctgtccgacacagaagagaaagcccagactagagatcctgacagaatgctctcactgtgcagaatcctccaggccgagggtaaaagaaaagagcgttgtgcatttgctaggaagagaaggaaggatcgggaggagggggagtgtttggtggattgagcaaaccatatgcaagccatgtctacccggcttcagttatgcctgggtctttagatatgtaggacactctcaataatgatagaccagcccgtgtaatgagtagccagttagaggcgatcattctgctcccagatttttctctactgtacatgaaagtcacaccgtgtgcttgtattcctgaatggtaatggtgactgtcactcaggaaccaccaccttctctgtgacaccacagctttgcctcctcggcccaggtctgcgtgccataggactcatcactgcttccctgaccacgctgctggaccctgcattgctgaaccccatgctgctggaccctgtggtgtacggtgggcaattgtttgctggtgcttttgtagggttaagttaaactctgagatcttgggcaaaacggcaaggggagagtcaggattcctctctccaaaggtcactccgaagttacttttgattcctggagcagaaatgactccttcctctagcccaagccagccaagaactcattcttagaggcaaagcagcccaagcccgactgtgcctgtcctccagcctgggctggttttgcagagtgtgtcttcaagaagaaaaaatggtaaagctatttattcaaaatgcttgttttttgctatgaatgatgcctgtgtttccacccacgccaagcacttgttcctattgtcttgataagaaactacatgtgtgcagtattttattaaaacgacattttatttaaaaaaaaaaaaa

SEQ ID NO: 69 - DNA, 3072 bp, Rattus norvegicus
  Genbank Accession No. NM_013106
cagaagacgcgtctcagccggtgtgtcgcggttccccgcggtgtgtgagtgagccagggcccggtcccctctccggccgccgtcatgggctgcacgttgagcgccgaggacaaggcggcggtggagcggagtaagatgatcgaccgcaacttgcgggaggacggagagaaagcggccaaagaagtgaagctgctgctgctcggcgctggagaatctggtaaaagtactattgtgaaacagatgaaaatcattcatgaggatggctattccgaggacgagtgtaagcagtataaagttgtcgtctacagcaataccattcagtccatcattgcaatcataagagccatgggacggttgaagattgattttggggaagctgccagagcggatgatgcccgacagttatttgttttagctggcagtgctgaggaaggagtcatgacttcagaactagcaggcgtgattaaacgtttatggcgagatggcggggtgcaggcatgcttcagcaggtccagggaatatcagctcaatgattctgcttcatattacctaaatgatttggatagaatatcccagaccaactacattccaactcagcaagatgttcttcggacgagagtgaagactacaggcattgtggagacccacttcaccttcaaggagctctacttcaaaatgtttgatgtaggtggccaaagatccgaacggaaaaagtggatccactgttttgagggagtgacagcaattatcttttgtgtggctctcagtgattacgaccttgttctggctgaggacgaggaaatgaaccgaatgcatgaaagcatgaaattgtttgacagcatttgtaacaacaaatggtttacagacacttcaatcattctcttccttaataagaaagacctttttgaggaaaaaataaagaggagtccattaacaatctgttatccagaatacacaggttccaatacgtacgaagaggcagctgcttacatccagtgccagtttgaagatctgaaccgaagaaaggacaccaaggaggtctacactcactttacctgtgccactgacaccaaaaacgtgcagtttgtttttgatgctgttacagatgtcatcattaaaaacaacttaaaggaatgtgggctttactgagaggatggcatagtaaaagctactacagggaggaatgttgagaccagacatcatctactgtctcttgggtcagcgacaagcatgacaggaccaaggaatggcaacagcatgcagaatctttagcacaatcttctgtattaggaaatgtttaattggcatgagaagagatgatcgagtcagacatgaaattggacaactgtaaagtatgaccggatcatcagggcaccgcttggactttaaatctcaatgtttagggcatattgaagtcgaggtgctgcattccagaacttaaacttgtagcttactgttccccgtctttttaacaaatgaccagtagttaatttctaaggtttttctcatcaagagaacaatacctaaaaactcttacttgtttgcaaaagaatcttctggggactcagtcttaactatgcacacaatgtagccggacatcttgaaatattcctcttagtaggaactgtttgtttttaactcttggaatggtcaggagtaatattccacagctaaaaatcttcctggttattgggactatactaatagagctttttggaatgaagtttatgttactgtcctgtttaaagtatcacaatggcttctaaacagcattcacttcggagagctgtacagtaagattctagctctcgtttcttaagcttacggttggagttaaccttgtttgtgctgattaccaaattactagatgaatactgatgtaatatgataaactgctcttgggtacagacacacgcaggatagctgtcagtcagagacgcagactgctaaggtgagaagcagtgacttgctgctacagatctaccgaggtggccacactgatttgcctgctcgtctcaggcgtgtgggttgtatgcggtggccccttgttttccatctttgtggccttttttgctaggagacgtctaagagtataacaactgtgcatgcctttcctttgtaaatgtgctgccaaatccctgcttgctgtcattgtcactgtatcgatggtaactgcatagcggcccttgctgtgttctttttctaagacttgcattctgggactctgttccaccttgtcacgtgtacagactttaatctgttacagctggcagcagtattaacgcggtgagtaaagagcccaggattgctcctgtttgtaaccgatcctttctggaagccctgccttctgtttctttttgcccctgctgagtgttctttagcctttgagagtgggtttaggtagaaaagtgtttttgaaagtctagttccttgatgtaatagtgatatcaaatctagggctgggggctttatgtccagtctgtgcaagtcatacaagtgtccgatgtgtacagtttgcttgcgctgagagcttcagtcctcttgtacagactgtatcaaatgtcattaaacactgagtggaccactgagggacggcgaaacagaggatgcattttgagcatttcagatcagtagtttgatcagtgccttttgaggtccagtctttgtggattggatccgttcatcttttgatgttacctcctactcatttgaaagaaggttggtggtcagaactgctttgggaagcaagccacggtgatcagtgccttcattggcagcttttaccatttttaattcttacgtgtctttgcgaaatcattattatgcagacagtataactgttatcttacaaatatttccatagggctaagaaagtatcacttgaaagaaaagtattgatttcaatcagcgattgactcaattcccacagtgtaggggttaataagtcttactctcaatttattgttcctttgttgtattctgtaatataagaacatctgggaatgcgaactagtggaatatgttttcataatttttctatactttgggtttaataaaatggtgttgataatc

SEQ ID NO: 70 - DNA, 2528 bp, Rattus norvegicus
  Genbank Accession No. NM_013113
gagcccgcgctccactcctttcgtccttcccggtgactttccctccttgtccctggtccatctcgccagaggtcatagcaggcagagtggtgcagctacagcttgaagcagcagctgcggggttcgctgagccccccgggaggcgatcggagcgcggggagagcaggagtgcggccacgcgcccacctctaggtgcggggctcggagccgcccagcccgcgcgcgccctcctccctcctccctcctccctccgcccccgccgcacctccccctcctcccgctctgcttaggctgctccgcggcgcgcctcgcactcggagagccgcagcggcagcggcgcgtctcgcctttggagacagagccgggccgcggggacaccgagcagtcgccgcgaggacgccagggcgcgcgcagcactcgctttccctcggcctcggccgccactgctgagcagacaccatggcccgcggaaaagccaaggaggaaggcagctggaagaaattcatctggaactcggagaagaaggagtttttgggcaggaccggtggtagttggtttaagatccttctgttctacgtgatattctatggctgcctggccggcatcttcatcgggaccatccaagtgatgctgcttaccatcagtgagctgaaacccacgtaccaggaccgtgtggccccgccaggattgacacagattcctcagatccaaaagactgaaatttccttccgtcctaatgaccccaagagctacgaggcctatgtgctaaacatcatcaggttcctggaaaagtacaaagattcggcccagaaggacgacatgattttcgaggattgtggcagtatgcccagtgaacccaaggagcggggagagttcaatcatgaacgaggagagcgcaaggtgtgcaggttcaagcttgactggctggggaactgctctggtctcaatgatgaatcctacggctacaaagaggggaagccctgtatcattatcaagctcaaccgaatgctgggcttcaaacctaagcctcccaagaatgaatccttggagacttaccctctgacgatgaagtataatccaaacgtcctacctgtccagtgcactggcaagcgcgatgaggataaggataaagttggaaacatagagtactttgggatgggcggattctatggctttcctctgcagtactatccctactacggcaaactcctgcagcccaagtacctgcagcccctgctggccgtgcagttcaccaacctcaccttggacactgaaatccgcattgagtgtaaggcgtatggtgagaacattgggtacagtgagaaagaccgttttcagggacgctttgatgtaaaaattgaagttaagagctgatcacaagcacaaatctttcccactagccatttaataagttaaagaaaaagatacacaaacctactagtcttgaacaaactgtcatacgtatgggacctacacttaatctctatgctttacactagcttctgcatttaataggttagaatgtaaatttaaagtgtagcaatagcaacaaaatatttattctactgtaaatgacaaaagaaaaaaataaaaattgagccttgggacgtgcccatttttactgtaattagactccgtaactgacttgtagtgagcagtgttctggcccctaagtatcgccgccgtctgttttatttagtgtacagtactataggtgcgcactctggtcattttccaagccatgttttatcatatctgttttctactttccgtgagcgaggtttgctgtccaaggtgtaaatactcatgggaataaaactggcatggtactttcccttcctttctcattttcttggctctgagatttcaaaggtaacggcccatcaacaagcatttttaacacactccatagtctttccctgtggtatcaggtctttactattgtttttctttgtttcctggggctggggggtgggctgtcgtgggggaactgccctttaaattctaagtgacgctgcagaaaaacaacggtgatgggttgtgttgtgctccgtgctgagtgctgtctcgccatctctccccttgtcctccagtgtgctccgaagctgtgtctgatctggatctgcccgtcactttggctagtgatggggctagttaatttgcttagtacatttccttttccttctttcctttctctggaggcatcatgtgctggtgctgtgtctttatgaatgttttaaccattttcatggtggaagaattttatatttatgcagttgtacaattttatttttttctgcaagaaaaagtgtaatgtatgaaataaaccaaagtcacttgtttgaaaataaaatctttattttgaactttataaaaagcaatgcagtaccccatagactggtgttaaatgttgtctacagtgctaatccatgttctagcatatgtagtgattgccaggagtacagtgctcttgttggtcttgtgtcagtcaggttaacacaatggacaataaaagaatgaacacattc

SEQ ID NO: 71 - DNA, 2248 bp, Rattus norvegicus
  Genbank Accession No. NM_013127
caggagcccaatggccaactatgaattttcccaggtgtctgaggacagacctggctgccgcctcactaggaaagcccagatcggtcttggagtgggtctcctgctcctggtcgccttggtagtggtcgtggtcatagttctgtggccgcgctcacccctggtgtggaaagggaagcctaccacgaagcacttcgctgacatcatcttgggacgctgcctgatctatactcaaatcctccggccggagatgagagatcaggactgcaagaagatactaagtacattcaaaagagggtttatttccaagaatccttgcaacatcaccaatgaagactacgcaccactggttaaattggttactcaaaccataccatgtaacaagactctcttttggagcaagtccaaacacctggcccatcagtatacttggatccaggggaaaatgttcaccctggaggacacactgctgggctatattgcagatgatctcaggtggtgtggagaccccagtacttccgatatgaactatgactcttgcccacattggagtgaaaattgtcccaacaaccctgttgctgtgttctggaatgtgatttcccaaaagtttgcagaagatgcctgtggtgtggtccaagtgatgctcaatgggtccctcagtgagccattttacagaaacagcacctttggaagtgtggaagtctttaatttggacccaaataaggttcataaactacaggcctgggtaatgcatgacattaaaggaacttccagtaatgcatgttcgagcccctccataaatgagctgaagtcgattgtgaacaaaaggaatatgatatttgcctgccaggataactaccgacctgtaagatttcttcagtgtgtgaagaatcctgagcatccatcatgtagacttaatgtgtgaaggacttggatctcagaatccccacacacactccgcagcacgcaatgaggtgaaagattcagaagcaacactgtcgggaaagcagcagttgtcagggagaggtctctactacaatgctaacatcagagatggaagagcttcccaatacattatgacagaacgacacgatcagctcagtgcgtcctgtgtactaccagtaatagtcaagaaaagtcactccataaaccagagttaaggttctatattgttatttcaatgtggtgcttttatattgtttatattttgctagcatccttttttcctctcttttaatgaggtctctctttctctcttaatgaggctgagaatcagacctgagaacttgcacacatggtggataagcctatataccactgagctaactcctcagcatggctggatttttattgaaaaatgccaatccaacttcccattggacaaagaaaatcaaacatcaagtttatcgaaatgaataaccttatttttttatgtttttgcattctccccacaaatattcaaatggtaaacatgaggtcatagggtcattatagagaaggtgctctgtggaaactacccacatgccctgtgctttagtcgatttttaacccatccaacatgtccttgttaactttgagttttattgggggggattggggggggttaacgtgagaaaatggagtttagagagataatttattttcctaaagtcacattcttaggatcatggttacatctgaaattaaatcagttctgtcaaagtcaacaacataagtttttttttttcttttctgagcttttattgccaaattgatagtagcctgtgttatcgtctagcaatagactctgcaatgtgatctttatgggtgatttcgaaactaattacttgcactctctttctcttcttcctcattcttggtgccttctgtaggtagtcaggagttagcttacatttgttgctgatatcggcaatttatgttttttatcctttttttcttacatctgtcttgctcggagtcactaatttggttgttattttgttgttgttggttgtctttttcaaagctccactctttacccttcctcatttatttatttaattgagcttttgtctatttttagaaacatagaaatttcttctgtcttcaatatctccatttagcttttttgaggcaaatgtttagaccattgctatttcagcctgttctcttttttcttttttataggatattttatgtatttacatttcaaatgttatcccctttcccagttcccccgccctgattctatgaggatacttccccttccaca

SEQ ID NO: 72 - DNA, 1313 bp, Rattus norvegicus
  Genbank Accession No. NM_013129
ccctcaggccaactccttgtgagacttcacagaaggcaaaggcgttccaggacacactgcagctgcggccaactgcccagggggtggagactgctctcgggctctcagttgcccttcaggttctgcaccctggggacctggcagtggcagaatcatgtgggcatctgaatccactttgacatatggccctctggctcttcaaagcagtgtttgttcatggtccatgctggcgaggtccttaagaacacagaagtccatgtcagcagataaccagcctaccggagccaaaagggtgtggaggaaacctactgctaacagtgaaccactgtcaactgagtattccgagaggcagcatcccctgctgactgagaaattgatccaagcattaacacctgctggaagaagcagagaaggttgtgcatggtctgggaatcccagagttcatctacaaacaaagaggaggcgttctggatggatggcagctggaagccttcgccatagcccgctcttcttcaacacttaagcatttacctgggcattaagtaatgaaaattttgaaaccatatatgaggaatacatccatcttgtactacctgtgtttccttctcaacagtcacttcttaactgaggctggcatccatgtcttcattttgggctgtgtcagtgtaggtctccctaaaacagaggccaactggatagatgtaagatacgatctggagaaaattgaaagtcttattcaatttattcatattgatactactctatacactgacagtgactttcatcccagttgcaaagttactgcaatgaactgctttctcctggaattacaggttattttgcacgagtacagtaacatgactcttaatgaaacagtaagaaacgtgctctaccttgcaaacagcactctgtcttctaacaagaatgtaatagagtctggctgcaaggaatgtgaggagctggaggagagaaacttcacggagtttttgcagagttttatacatattgtccaaatgttcatcaacacgtcctgactgcactcgaaccttgtcagtgtttctgttattaagacacctccgcctgcccagaggcagcacagctccatgcattcgtgatctgctgggaaaccaagctgcctaacaggaaacggttgagccatttggatcccatgaaccctcgggaatgaagagagggaaagggcttttctcggacttatttttgcttgcttatttttaatttattacttcagttgtgcatatttgtaatataatagaagatgtggaataaagttgtatgcatattttatcagttga

SEQ ID NO: 73 - DNA, 1500 bp, Rattus norvegicus
  Genbank Accession No. NM_013144
cgccgagcacaaacccagcgagcattgaacactgcacacggccatctgcccagagagctgtgaccaccacttccgctactatctactcagaaagtcgtgactactgagccactgctgcctgcccagattctcatccaccgcctgctgcgtctggttgcgatgccggagttcctaactgttgtttcttggccgttcctgatcctcctgtccttccaggttcgcgtagtcgctggagccccccagccatggcactgtgctccctgcactgctgagaggctggagctctgtccacccgtgcctgcttcgtgccccgagatttctcggcctgcgggctgtggctgctgcccgacatgtgccttgccactgggtgctgcctgtggtgtggccactgcgcgctgcgctcagggactcagctgccgtgcgctgccaggggagcctcgacctctgcatgccctcacccgtggccagggagcctgtgtactagaacctgccgcacccgccacgagcagcttgtccggttctcagcatgaagaggcaaaggctgctgtggcctctgaggatgagcttgccgagagcccagagatgacagaggaacagctgctggatagcttccacctcatggccccatcccgtgaggaccagcccatcctgtggaatgccattagcacctacagcagcatgcgggcccgggagatcactgacctcaagaaatggaaggagccctgccaacgggaactctataaagtgttagagagattagctgccgctcaacagaaagcaggagatgagatctacaaattttatctgccaaactgcaacaagaatggattttatcacagcaaacagtgcgagacatctctggatggagaagctgggctctgctggtgtgtctacccatggagtgggaagaagatccctggatctctggagaccagaggggaccccaactgccaccagtattttaatgtgcaaaactgaaagttgtttcctccctccttcttcacacaaaatatttaagtatatagtgtatttatactccggagcacaccattttatatatgtgtatatgtatatatccaggaactagtttttatactccacatgctgcttgatgtacaagtgggtttgtatttattcactctaagtttatttttttctaccctgtccttgtgctgtattaatttatataactgaagcttttctcatctccatacatgtaaatactaccatctcagctcttccagagttctgctttgaaagggcagcgcggtagtgcctagaacgagcacaagtcagtctgaggtaggggcctttcagtgggttcagggaggaaggttagccctggctcggggagacttcctcatcgaatcccacaggtctgtgtctgatgcctattggctgggaaggttccgatgttggttgtgtaatcaaagctaaacgtggaaagctgcgtcccatgcactgttaaacacacgtctggaataaaacattctacctgga

SEQ ID NO: 74 - DNA, 1200 bp, Rattus norvegicus
  Genbank Accession No. NM_013154
catgagcgccgctcttttcagcctagacagcccagcacgcggcgcaccctggcccacagagcccgcggccttctacgagccaggcagggtgggcaagccaggacgagggccggagcctggggatctgggggagccgggctccacgacccctgccatgtatgacgacgagagcgccatcgacttcagcgcctacattgattccatggctgccgtgcccaccctagagttgtgccacgacgagatcttcgccgacctcttcaacagcaatcacaaagcggccggcgcgggcagcctggagctgctgcagggcggccctacgcgacccccgggtgtggggtcaatcgccaggggcccgctgaagcgcgaacccgactggggcgacggcgacgcgccgggctccctgctgccggcgcaagtggcagtgtgcgcgcagacagtggtgagcttggcggccgcggcacagcccacaccacccacttcgcccgagcctcctcgaggcagccctggaccgagccttgcgcctggccccgtccgagagaagggcgccggcaagaggggtccggaccggggcagccctgagtaccggcagcgacgcgagcgcaacaacatcgctgtgcgcaagagccgggacaaggccaagcgccgcaaccaggagatgcagcagaagctggtggagctgtcggccgagaacgagaagctgcatcagcgtgtggagcagctcacccgggacctggccagcctccggcagttcttcaaagagctgcccagcccgcctttcctgccgcccaccggcaccgactgccggtaacgcgcggtgtgggccttagagactccgaacgaccgatacctcagaccccgacggcggggagcagacgccgcccgaattgctacagtttcttgggcactggactgcgagagaagctatatgaatcccccttaaattatttttttataatggtagcgttttctacgtcttattaccattgcagctaaggtacattgtagaaaagacttttccgacagacttttgtagataagaggaagagactgcgcatgctttttatattcatttttacagtatttgtaagaataaagaagcatttaaattgcaaaaaaaaagaggcaccagctctgactggcctctttctaggctacggtgatcctgagcatcttttgttacctgctggtagaaatgatcct

SEQ ID NO: 75 - DNA, 2952 bp, Rattus norvegicus
  Genbank Accession No. NM_013155
gagaaggggtgcccgctccttgcgtcgtctccgtgctcccggctcctcactccttccccctcctcctcgcctcctccctccccgcccccacctccttcctcctctccgaagggctggtaacttgttgtgcggagcgaacggcgacaacgacgccgcgacggaggcaccatccgggcgggcagcatgggcacgtccgcgcgttgggcgctgtggctgctgctcgcgctgtgctgggcgccccgggacagcggcgccactgcaagcgggaagaaagccaaatgtgacagctcccaattccagtgcacaaatggtcgctgcattactctgctgtggaaatgtgatggagacgaagactgtactgatggcagtgacgagaagaactgtgtgaagaagacatgtgctgagtcagacttcgtgtgcaaaaacggccagtgtgttcccaacagatggcagtgtgatggggaccctgattgtgaagatggttctgatgaaagcccagaacagtgccatatgagaacatgccgcataaatgaaatcagctgtggcgcccgttctactcagtgtatcccagagtcctggagatgcgatggtgaaaatgattgtgacaatggagaagatgaagaaaactgtggcaacattacatgtagcgcggatgagttcacttgctccagtggccgctgtgtctccaggaactttgtgtgcaatggacaggatgactgtgacgatggcagtgatgagctggactgtgctccaccgacctgcggtgcccacgagttccagtgcaggacctcctcctgcatcccgctcagctgggtgtgtgacgatgacgcagactgttccgaccaatcagacgagtctcttgagcagtgtggccgtcagcctgtgatacacaccaaatgtcccaccagtgagatccagtgtggctctggcgagtgcattcacaaaaaatggcggtgtgacggagacccggactgcaaggacggcagcgacgaggtcaactgtccttctcgaacctgcagacctgaccagtttgaatgtgaggacggtagctgtatccatggcagcagacaatgcaacggcatccgagactgtgttgacggctctgatgaagtcaactgcaaaaacgtcaatcagtgcctgggccctggaaagtttaagtgcagaagtggggaatgcatagacatcaccaaagtatgtgaccaggaacaggactgcagagactggagcgacgagcccctgaaggagtgccatatcaacgaatgcttggtcaataacggtggctgttcccatatctgcaaagacctagtcataggttatgaatgtgactgtgcagctgggtttgaactgatagacaggaaaacctgtggagatattgatgaatgccaaaatccggggatctgcagtcaaatttgtatcaacttaaaaggcggttacaaatgtgaatgtagtcgtggctatcaaatggatcttgccactggcgtgtgcaaggcagtaggcaaagagccaagtctgatcttcactaatcgaagagacatcaggaagattggactagagaggaaggaatacatccaacttgtagaacaactaagaaacacggtggctctcgatgctgacattgcagctcagaagctattttgggctgatctaagccaaaaggccatcttcagtgcctcaattgatgacaaggttggtagacattttaaaatgatcgacaatgtctataatcctgcagccattgctgttgattgggtgtacaagaccatctactggactgatgcggcttctaagactatttcagtagctactctagacggaaccaagaggaagttcctgtttaactctgatttgcgagagcctgcctccatagctgtggatccgttgtctggctttgtttactggtcagactggggtgagccagctaaaatagaaaaagcaggaatgaatggatttgatagacgtccactggtgacagaggacatccaatggcctaatggaattaccctcgaccttgtcaaaagccgcctctactggctggattccaagttgcacatgctctctagtgtggacctgaatggtcaagatcgtaggatagtgctcaagtctctggagttcctagctcatcctcttgcactcaccatatttgaggatcgtgtctactggatagatggagaaaatgaagcagtgtatggtgccaataaattcactgggtcagagctggccactctagtgaacaatctcaatgatgcccaagacatcattatctaccatgaactcgtccagccttcaggtaaaaactggtgtgaggaagatatggagaatggaggatgtgaatatctctgcctgccagcaccacagatcaatgatcactctccaaaatatacctgttcctgtcccaatgggtacaatcttgaagaaaatggacgcgagtgtcaaagtacttcaactcctgtcacttacagtgagacaaaagatgtcaacacaacagacatcctacgaactagtggacttgttcctggagggatcaatgtgaccacagcagtatcagaagtcagtgttcccccaaaagggacttcagctgcctgggccatccttcctctcttgctcttagtgatggcagcagtaggtggctacttgatgtggaggaattggcaacataaaaacatgaaaagcatgaactttgacaatcccgtgtacttgaagaccactgaagaggacctctcaatagacattggtagacatagcgcctctgtaggacacacatacccagcaatctcagttgtaagcacagatgatgatttggcttgagttctggaacaagtcttgctctatgaggtctacacccataacaccctactccggaatggtaacagagccagcagctgaagtttctttttcttcctcccatctggaagaacatcaagatatcttttcgtggatcaagcttgtgtactt

SEQ ID NO: 76 - DNA, 1386 bp, Rattus norvegicus
  Genbank Accession No. NM_013156
aattccgcggcgacctccggggatccgagtttgcagactacgtgtgtgcgcagctagccacctcaggtgtttgaaccatgacccctttactcctcctggctgtcctctgcttgggaacagccttagccactccaaaatttgatcaaacgtttaatgcacagtggcaccagtggaagtccacacacagaagactgtatggcacgaatgaggaagagtggaggagagcagtgtgggagaagaacatgaggatgatccagctacacaatggggagtacagcaacgggaagcacggctttaccatggagatgaacgccttcggtgacatgaccaatgaggaattcaggcagatagtgaatggctatcgccaccagaagcacaagaagggaaggttatttcaggaacctctgatgctgcagatccccaagactgtggactggagagaaaagggttgtgtgactcctgtgaagaatcagggccagtgtggttcttgctgggcttttagcgcatcgggttgcctagaaggacagatgttccttaagactggcaaactgatctcactgagtgaacagaaccttgtggactgttctcacgatcaaggcaatcagggctgtaatggaggcctgatggattttgctttccagtacattaaggaaaatggaggtctggactcagaggagtcttatccctatgaagcaaaggatggatcttgtaaatacagagctgagtatgctgtggctaacgacacagggtttgtggatatccctcagcaagagaaagccctcatgaagcctgtagcgacggtggggcctatttctgttgccatggatgcaagccatccgtctctccagttctatagttcaggtatctactatgaacccaactgtagcagcaaggacctcgaccatggggttctggtggttggctatggttatgaaggaacagattcaaataaggataaatactggcttgtcaaaaacagctggggtaaagaatggggtatggatggctacatcaaaatagccaaagaccggaacaaccactgcggacttgccaccgcagccagctatcctatcgtgaattgatggacagcgataataaggactgacggacactacatccgaaggagttcatcttaaaactgaccaaacccgtctctgagtgagaccatggtacttgaatcgttcaggatccaagtcacgatttaaattctgttgacatttttacatgggttaaatgttaccactacttaaaactcctgttataaacagctttataatattggacacttaatgcttaattctgattctggaatatttgttttataaaagttgtataaaactttctttaccttttaaaaataaattttagctcagtgcaaaaaaaaaa

SEQ ID NO: 77 - DNA, 5106 bp, Rattus norvegicus
  Genbank Accession No. NM_013187
cgctcgcctcccgggccgccgccgccgcctccgcctccgcctccgcctccgccgccccgggcccgccggcttgcgtcgccgaggtcgctgcagcatggcgggcgtcgggaccccctgcgccaacggctgcgggcccagcgcgccctccgaagcggaggtgctgcacctctgccgcagcctcgaggtgggcaccgtcatgactttgttctactccaagaagtcgcagcggccagaacggaagaccttccaggtcaagttggagacgcgccagatcacatggagccgcggtgcggacaaaatcgaggggtccatcgatatccgagaaatcaaggagatccgcccagggaagacttcccgggactttgaccgctaccaagaagaccctgccttccggccagatcagtcacactgttttgtcatcctctatggaatggaattccgcctgaagaccctgagcctgcaagccacatctgaggatgaagtgaacatgtggatcaagggcttaacttggctcatggaagatacgctgcaggcggccacacccctgcaaattgagagatggctccggaagcagttctactcagtggatcgtaaccgagaggatcgtatatcagccaaggacctgaagaacatgctgtcacaggtcaactaccgggtccccaacatgcgcttcctccgagagcggctgacggactttgaacagcgcagcggggacatcacctatgggcagtttgctcagctttaccgcagcctcatgtacagcgcccagaagacgatggaccttccgttcttggaaaccaacactttgaggactggagagcggccagagctttgccaggtgtccctttctgagttccagcagttccttcttgagtaccagggggagctgtgggctgtcgaccggcttcaggtgcaggaatttatgctcagcttccttcgagaccccttgcgagagattgaggagccatacttcttcttggatgagcttgtcacctttctgttctccaaagagaacagtgtgtggaactcacagctggatgccgtgtgcccagaaaccatgaacaacccactgtctcactattggatctcttcctcgcataatacgtatctgactggggaccagttctccagcgagtcctccctggaagcctacgctcgctgcctgaggatgggctgtcgctgcatcgagttggactgctgggatgggccagatgggatgccagtcatttaccatgggcacaccctcaccaccaagattaagttctcagatgtcctgcacaccatcaaggagcacgcgttcgtagcctcagagtaccctgtcatcctgtccatcgaggaccactgcagcattgcccagcagaggaacatggcccagcacttcaggaaggtgctcggtgacacgctcctcaccaagcccgtggacattgccgctgatgggctcccttctcccaaccagctcaagaggaagatcctgattaagcataagaagctggctgagggcagtgcctatgaggaggtgcctacctctgtgatgtactctgagaatgacatcagtaactccatcaagaatggtatcctctacttggaggaccccgtgaatcatgagtggtacccccactactttgttctgactagcagcaagatctactactctgaggagaccagcagtgaccagggaaatgaggatgaagaggagccgaaggaggccagtggcagcacagagctgcactcgagcgagaagtggttccacgggaagctcggggctgggcgcgacgggcggcacattgctgagcgcctgctcaccgagtactgcatagagactggggctcccgatggctccttcctagtgcgagaaagtgagaccttcgtgggggactacacgctgtctttttggcggaatgggaaagtccagcactgccgtatccactcccggcaggatgctgggactcctaagttcttcttgacagataaccttgtctttgactctctctatgacctcatcacacattatcagcaagtgcccctgcgctgcaatgagtttgagatgcgcctttcagagcctgttccacagacgaatgcccatgagagcaaagagtggtaccacgcaagcctgactagagctcaggctgaacacatgctgatgcgagtaccccgtgatggggccttcctggtgcggaagcgcaacgagcccaactcctatgccatctctttccgggctgagggaaagatcaagcactgccgagtacagcaggaaggccagactgtgatgctggggaactctgagtttgacagcctggtcgacctcatcagctactatgagaagcatcccctgtaccgcaaaatgaaactgcgctaccccatcaacgaggaggcgctggagaagattgggacagctgaacccgattatggggcactgtatgagggccgcaaccctggtttctatgtggaggccaaccctatgccaactttcaagtgtgcagtaaaagctctcttcgactacaaggcccagagagaggatgagctgacttttaccaagagcgccatcatccagaatgtggaaaagcaagatggtggctggtggcgtggggactatggtgggaagaagcagctgtggttcccctcaaactatgtggaagagatgatcaatccagcaatcctagagccggagagggagcatctggatgagaacagcccactgggggacttgctgcgaggggtcttagatgtgccagcctgccagatcgccattcgtcctgagggcaaaaacaaccggctcttcgtcttctccatcagcatgccgtcagtggctcagtggtccctagacgttgccgctgactcacaggaggagttgcaggactgggtgaaaaagatccgtgaagttgcccagactgcagatgccaggcttactgaggggaagatgatggagaggaggaagaagatcgccttggagctctccgagctcgtggtctactgccggcctgttccctttgacgaagagaagattggcacagaacgcgcttgttaccgggacatgtcctcctttccggaaaccaaggctgagaagtatgtgaacaaggccaaaggcaagaagttcctccagtacaaccggctgcagctctctcgcatctaccctaagggtcagaggctggactcctccaattatgaccctctgcccatgtggatctgtggcagccagcttgtagctctcaattttcagaccccagacaagcctatgcagatgaaccaggccctcttcatggctggtggacactgtggctatgtgctgcagccaagcaccatgagagatgaagcctttgacccctttgataagagcagtctccgaggtctggagccctgtgtcatttgcattgaggtgctgggggccaggcatctgccgaagaatggccggggtattgtgtgtcctttcgtggagattgaagtggctggggcagagtacgacagcaccaagcagaagacagagtttgtagtggacaatggactgaaccctgtgtggcctgcaaagcccttccacttccagatcagtaacccagagtttgcctttctgcgctttgtggtgtatgaggaagacatgtttagtgaccagaacttcttggctcaggctactttcccagtaaaaggcctgaagacaggatacagagcagtgcctttgaagaacaactacagtgaagacctggagttggcctccctgctcatcaagattgacattttccctgctaaggagaatggtgacctcagccctttcagtggtacatccctaagggaacgggcctcagatgcctccagccagctgttccatgtccgggcccgggaagggtcctttgaagccagataccagcagccatttgaagacttccgcatctcgcaggagcatctcgcagaccattttgacagtcgggaacgaagggccccaagaaggactcgggtcaatggagacaaccgcctctagtcatgcccctaccttgttggagagcagcagcgctgccacctgtggaatgccatgaactgggttctctgggagcggtctactgtaaagccttcctggtctcacagcctggagcctggattccagcggtgaaggctagacaaaaccaagccattaatgagatgtactgttttgggcctccatgcccagctctgggtgaaggcaaaaaactgtactgtgtctcgcattaagcacacacatctggccctgaatgtggaggtgggtccctccatcttgggccaggactagggctgaagccccttggaaagagaagttgcctcagttggtggcataggaagcttcaaggagctgctgacacattcctgaaagaggaagaggaggaggaggaagagccttgctgggccaggggaacaaagtttacattgtcctgtagctttaaaaccacagctggtcagggtgaaagagtagatgccctgaggcttggccctggagccaggtcagaggaatgcagggcctgtaaggagaaggctctgctctgcctgaggaggaagacagcacaagggcacattgccaccgtgggtatactacccagcctgaaagatacaggggatcatgataaatagcagtattatttttttttttcttctcagtggtattgtgactaagttattctgtcctgctcctcaccttggaagggaagacccagcacagagcctttaggaacagcagctctatggggtgttgttactggaagagggcactgtccagaagggtggaggggcagaaagagagaaaatcgatgtctaccctggtgagcgtttttgtttttatggcaaggaaggctcattatgctctcccaaaggaatggagacatgggtaagtggagtcaggcagtaggcaccaaatgaagctgctgcttggtagtctctgtgtggttggtaaaaagatgcaaaggagatgggaaggtaagcctcacctctgaggacagggtggggtccaggcctgtgggtgcaaaggtgcctcagcatagccagcattcagcacacgcaaacccactgcccacatttgggctcagggttggccatttgctagttctgctgccctcttaagatctgactgccaaataaatcatcctcatgtcc

SEQ ID NO: 78 - DNA, 1899 bp, Rattus norvegicus
  Genbank Accession No. NM_013197
gactttgggctcaggatggtggcagcagctatgttgctacggtcctgtccagtgctctctaagggccccacaggcctcctaggcaaagtggctaaaacttaccagttcctatttggtattggacgctgccccatcctggccactcaaggaccaacctgttctcaaatccatcttaaggcaaccaaggctggagcagactctccgtcttggactaagagccattgtcctttcatgctgtcagaactccaagacaggaagagcaagattgtgcagagggcagctccagaagtccaagaggatgtcaagactttcaagacagacctgctgagcttcatggagtcaactacccgaagccaatcagtgcctcgtttccaggatccagagcagactggaggggcacctcccctgctgattcagaataatatgactggaagccaggcttttggttatgaccaattttttagagacaagatcatggaaaagaagcaggaccacacataccgtgtgttcaagactgtgaatcgctgggctaatgcctacccctttgcccaacacttctccgaggcatctatggactcaaaggatgtttctgtctggtgcagtaatgactatttgggcataagcaggcaccctcgtgtcttgcaggccatagaggagaccctgaagaatcatggagctggagctgggggcactcgcaatatctcaggtacaagcaagtttcatgtggagcttgaacaggagctggctgaactacatcataaggactcggctctgctcttctcctcctgttttgtggccaatgattctactctctttacactggccaagcttctgccagggtgtgagatctactcagacgcaggcaatcatgcctccatgatccaaggcattcgtaacagtggtgcagtcaagtttgtcttcagacacaatgacccaggccacctgaagaaacttcttgagaagtccgatcccaagacaccaaaaattgtggcttttgagactgttcactccatggatggtgccatctgtcctctggaggaattgtgtgatgtggcccaccagtacggggccctgaccttcgtggatgaagtccatgccgtaggactatatggaacccggggtgcagggatcggggagcgtgatggaattatgcacaagcttgacatcatctctggaactcttggcaaggcctttggctgtgtcggtggctatatcgccagcactcgggacttggtggacatggtgcgctcctacgctgcaggcttcatctttaccacttcactgcctcccatggtgctctctggagctctagagtctgtgcgtctactcaagggagaggagggtcaagccctgaggcgtgcacaccagcgcaacgtcaaacatatgcgccagctactaatggacaggggctttcctgttatcccctgtcccagccacatcatccccataagggtgggtaatgcggcactcaacagcaagatctgtgatcttctgctcgccaagcacagcatctatgtgcaggccatcaactacccaactgtgcctcgtggtgaggagctgctgcgcttggccccctccccccaccacagccctcagatgatggaaaactttgtggagaagttgctgctggcctggactgaggtggggttgcccctccaagatgtgtctgtggctgcatgcaacttctgccgtcgtcctgtgcactttgagcttatgagcgagtgggagcgatcctactttgggaacatgggaccccaatatgttactacctatgcctaaggagccagctgccttagatgccaaccccacctgcactccccctggggatggtcttcctcctactctctgctttgctgtgtgcttctagctgacttgattctaaaaataaagagcaacctg

SEQ ID NO: 79 - DNA, 1061 bp, Rattus norvegicus
  Genbank Accession No. NM_013218
ggccaggccaggccgcagttcagcgtctgcgcacgttcggccaccgttgccaccatgggggcatcggggcggctgctgcgcgccgtgatcatgggggccccgggctccggtaagggcactgggtcgtcacgcatcaccaaacacttcgagctgaagcacctctccagcggggacctgctccgccagaacatgctgcagggcacagaaatcgctgtgttggccaagagcttcattgaccaaggaaagctcatcccggatgatgacatgactcggctggccctccatgagctgaaaaaccttacccagtgtagctggctgttggacggatttccaaggacacttccacaggcagaagccctggatagagtttatcagatagacacagtgataaatctcaacgtgccctttgaggtcattaaactacgccttactgctcgctggattcatcctgccagtggccgagtttacaacattgaattcaaccctcccaagactgtgggcatcgatgacctaacgggagaacctctgattcagcgtgaggacgacaaaccagagacggtgatcaagagattgaaagcgtatgaagcccagacagagccggtcctgcagtattaccagaaaaaaggggtgttggaaacattctccggaacagaaaccaacaagatcaggccccacgtatactccttcctgcaaatgaaagttccagaaaccatccaaaaagcctctgttactccctgaggaaggcacttggcgggatgaagcagggcctcctccactcctcccctcgcctctgtatttcgaagctgttttcctaagacttctctgaaaattatgatttaagtcctaatggccttgcctaatgagtcagaaactaaggctgaccgtgtgtttatgtasgttgtccttccatggatgtgcaattgaaaacgtcagacatgttgaaacaaacaaactcagagcacaattaagagagcaactggtggggttggggatttagctcagtggtagagcgcttgcctaggaagtacaaggccctgggttcggtccccagctccgaaaaa

SEQ ID NO: 80 - DNA, 1749 bp, Rattus norvegicus
  Genbank Accession No. NM_013220
cccgggcaggtccaggggttcagccacaagagggaaaaacatagactaacggctgccaacatgatggtttttcgagtagaggagctggtaacgggcaaaaagaacagcaatgggtcctcaggggagttccttcctggcgagttcagaaatggagagtatgaagctgctgttgccttggagaaacaagaggacttgaagacacttccagccaacagtgtgaacctgggggaagaacaacggaaaagtgagaaagttcgagaggcagagctcaaaaagaaaaaactagaacaaagatcaaagcttgaaaacttagaagaccttgaaataattgttcaactgaagaaaagaaaaaaatacaagaaaactaaagttccagttgtgaaggaaccggagcctgaaattattactgaacctgtggatgtgccaaggtttctgaaagctgcactggagaacaaactgccagttgtagagaaattcctgtcagacaagaacagccccgacgtctgcgatgagtataaacggaccgctctccatagagcatgcttagaaggacacttggcgatcgtggagaagttaatggaggctggagcccagattgaattccgagatatgctggaatccacagccatccactgggcatgtcgtggaggaaacctggatgtcctgaaactgttgctaaacaaaggtgccaaaatcagtgcccgagacaagctgctcagcacagcgctgcacgtggcggtgaggaccggtcactacgagtgtgctgagcacctcatcgcctgcgaggcggatctcaatgccaaggacagagaaggagacacccctctgcatgatgcggtgaggttgaatcgctacaagatgatccggctcttgatgaccttcggtgcggacctcaatgtcaagaactgtgctgggaagatccctatggatctggtgttgcactggcagaatggaaccaaagcgatattcgacagcctcaaggagaatgcctacaaaaactcgcgcatagctacgttctgaggaaagagactcgacaggagctgttctcagccgttttcaaaacatttcccagcagcggagcaaccagctataacacccagcttttgtttgccagccaaatagggagataagctttaaagacgcttcatggaaggaccctgggttagagatgctaacatgtcctctagcgatgctcaccatttttatctgctcctatttatttatttatttatttcatagcactggtagtcaggttttcatgagcatcattttgggggagcaagacttaatctgtgtgtaacattcggagtcttcccgtggctctaaaaccgcgtgggtgaatggtgtctaatctcccttttgtgtcctcacttgcattaaagctactcaaggtatttttgaaagccaagggttggtcggtcgctgcagcccttctctggattctcactgctgatatccgaatgaagcagcagaaggtgtacaggaatgcagaaggggatgggagcagttctgcaggacctaagccgtggctcgccaggcacccacaggtgtggtttgccggatcacacagtgccgaggtgaaggccacgtcaggagcgtgtgtggagggggatggagggagtaggcaatggggcctcactaacctgaggtcgatgagaggaaaaagtccaaaaggacatgccctgtaaatgtgtaaatggtattgtgttgtatgcatattttatattcctaataaatgcaaactaattc

SEQ ID NO: 81 - DNA, 435 bp, Rattus norvegicus
  Genbank Accession No. NM_013224
ctctttcgagtcttggctccaatatgaccaaaaaaaggagaaacaacggtcgtgccaaaaagggccgcggccatgtgcaaccaattcgctgcacgaactgcgcccggtgcgtgcccaaggataaggccattaagaagtttgtcattcggaacattgtagaagccgctgcagtcagggacatatctgaagcaagcgtcttcgacgcttacgtgcttcccaagctctatgtcaagctgcactactgcgtgagctgtgccattcatagcaaggttgtcaggaatcgatctcgtgaggcccggaaggaccgaacacccccaccacgattcagacctgctggcgctgcaccacgacctccaccaaagcccatgtaaagaggtgatttcatgaagacagaaagaaaaataccatggaaaaataaaactgaagttatacttt

SEQ ID NO: 82 - DNA, 2681 bp, Rattus norvegicus
  Genbank Accession No. NM_016989
tttattggatatgaattttacaaatattacgtcaattagcggtaacggtggagctgaagagtgttgcgccttctccaggctgcacggcgagacccaccaatggtgtggtggaacttgtggccctttccaaggccacggctcttgcggccagcagatgtcagcccacgcatctccctgtgcttgtggactggtttggtaatccattgggtgtcgggatttcttctgatagctttatggaatggatcaatgaggataacctcaaaaaatttatatgtggaatcttcaccaacccagtaggaattcaggactctcaaagctccacaatggcgcccagctctctcctcagcaacagactgaaggcttcggctagttttgtgcgtctacaaagctttgagcggaattttagcttcggcaaacaagtccccccagctcctccagctaattcccgcgacttctctccagacaccagctccagacagtgactgatgcctctctggttgtgattccagcgcagaaactcgaaggagccctttgcccgccgtcctatttagtcaactctttcctagccgcgaatgaccatgtgtagcggagcaaggttggccctgttggtctacgggataataatgcataacagcgtctcctgttcacctgccgccggactcagcttccctgggatcagaccagaagaagaggcttacgatcaggacggaaacccgctgcaagacttctacgactgggaccctccgggcgcagggagccccgcctccgcgctgcgtgacgcctacgccctttactacccagccgacaggagagatgtcgcccacgaaatccttaacgaagcctaccgcaaagtcttggaccagctgtccgccaggaagtacctgcagtccatggtggccaggggcatgggcgagaacctcgccgccgccgcggtggacgaccgggcaccccttaccaaacgccactcggacggcatcttcacagacagctatagccgctaccgaaaacaaatggctgtcaagaaatacttggcggccgtgctagggaaaaggtataaacagagggttaaaaacaaaggacgccgaatagcgtacttgtagcgatgagttgccagctaccgtgtgtataaaatgaaaagtcgttttccaaattgactgaccagtcatcactcatgtgttctttccaaacatgtatttatgtatcaagtaaagccattaaatgactattttgataataatattgtttttctttttacgaagcactggagaatgcacagatatactttgtggaccaattattgatatatattataagtatatattaagaatatatataggtatagcagagagcaattcataagcgtgcacaaagattgaaaattcgcctgagctgtttatgtttttatataaaatgaatagagaaaatagacaaccattgttttgaatattactcctatttttgtaaactggaattaaaggatagtatttttatccacaaccggcttgaagataccaataatggccatttgtacaaaaaaatgatgccctgctccaggagaattctgaggtaatgacttcccaaattgctgaagggctttctttccttgtgagtctctggggcaggctgcttgaaccccagcctaactaactcaagtgggcattgtcccactggttgcgggacaattccaacactttcattttctttgactatacctttatgtgtatctgtctctcctcagagtcccagcccataaggaaattctaattactgaacagctcgatccaaattgtgcttctccccaaaattcatgtcatttccttggagaagagtcgaggaactgtacagaagagaccagcttggagagaaagcgctcttttttgtacttcctgattcttcagggaactgactatcctaaagctagggcaattggaacaaagtgaaagataaagagaggactggaaggggcagagcatggggtgtggaggaggaccctgtagagggactgatttgagagttgcctcaggtctgagaatctgggggcaagtctagtccctctgcaggttccactgcctgacagatcaggtgctggtgttggaatgaatgaatgcaaagtacaatgtgtttttctccagtgctgtccatgcttttcatgtcgtgaaatgaccaggatcctcccctttgaacactgctctgcagaagccacccctattctttgtggtttttctggagaacctccttcctacccttgccctcctgcactgtttaagaatctcgtatgccattttccactcacttatcttaaatttgtgaatgctagttattttttgttgttgtttgatgcaagcagttactgtgaagtttaggaacccctgtttagctaccacagagtgagtatgcactaaatatgaaccttttgtttcttgtttattgagtttgtaggtaaaatgtatttttctatattatggcttattgcttagtaaagcaagcccagcttcctgaggggccttttgtcctgttagcaattgaggcatttgcagaacactgtacagaccccgctctcccctgtacattcctccctggtggtgcccggtccccacttggggatgggagttttgtagactgtacagaaatcggcaccctattttcttgcagctctcagattttgttaatctggattatac

SEQ ID NO: 83 - DNA, 1804 bp, Rattus norvegicus
  Genbank Accession No. NM_017039
ctggggccgcaggaagcaccccggggagcggcggcggcgtgtgcgtgtggcccgggtgcgggcggcggcgcgggagcagcgcagagcggcagccggttcgggcgggcggcatcatggacgagaagttgttcaccaaggagctggaccagtggatcgagcagctgaacgagtgcaagcagctctccgagtcccaggtcaagagcctctgcgagaaggctaaagaaatcctgacaaaagaatctaatgttcaggaggttcgatgtccagtcactgtgtgtggagatgtgcatgggcaatttcatgacctcatggaactctttagaattggtggtaaatcaccagatacaaattacttgtttatgggagactatgtggacagaggatattactcagttgaaacagttacactgcttgtagctcttaaggttcgttaccgagagcgtatcaccatactccgagggaatcacgagagcagacagatcacacaagtttatggtttctacgatgagtgtttaaggaaatacggaaatgcaaatgtttggaaatacttcacagacctttttgactaccttcctctcactgccttggtggatgggcagatcttctgtctacatggtggtctttcaccatccatagacacactggatcacatccgagcacttgatcgcctacaagaagttcctcatgagggtccaatgtgtgacttgctgtggtcagatccagatgaccgtggtggctgggggatatctcctcggggagctggttatacctttggccaagatatttctgagacatttaatcatgccaatggcctcacgttggtgtccagagctcaccagctggtgatggagggatataactggtgccatgaccggaatgtagtaacaattttcagtgctccaaactattgctatcgttgtggtaaccaagctgcaatcatggaacttgatgacactcttaagtattctttcttgcagttcgatccagcacctcgtagaggcgagccacatgtcactcgtcgtaccccagactacttcctgtaatgaaagtttaaccttgtacagtattgccatgaacaccgtctgttgacctaatggaatcgggaagagcagcagtaactccaaagtgtcagaaatagttaacattcaaacttgtttccacacggaccaaaagatgtgccatataaaatacaaagcctcttgtcatcaacagccgtgaccactttagaatgaaccagttcattgcatgctgacgcgacattgttggtcaagaatccagtttctggcatagcgctatttgtagttacttttgctttcttgagagactgcagatctaggatgtaacattaacacctgtgagtccagttgacttccacttagctgtagcttactcagcatgactgtagatgaggatagcaaacaatcattggagcttaatgaacatttttaaatgagtaccaaggcctcccctcttgttgtgttctttcagggatactattaatttaattgtatgatttctctgcactcagtttctcccttctcaaatctcggccccgcgttgttctttgttactgtcagaaaacctggtgagttgttttgaacagaactgtctccctcctgtaagatgatgtactgcacaagtcaccgcagtgttttcataataaacttgagaactgagaaagtcaggtttgaattgtatcagtgggcacgactggtgctgtttattaaacaagataaatctattgatcaatttcagaatttgtagaattccaggtaaagaaaaataaagatcaaggccactatat

SEQ ID NO: 84 - DNA, 1843 bp, Rattus norvegicus
  Genbank Accession No. NM_017040
ggcacgagcgccgagagaaccgcggccagagcgcggagaggcctgcgggcggcgacggcagcgggagggcgggcgccgtcgggccggagcctcccccgagccgcgccgcgctctggctccgagccgtgagccctttttgccgcgccccgagcgcgtggccgggggccgggcggggcgggcgctcccggaggccggggccggcggctgcccgctgggcttgggcggggcgcgggctgcccgctccgcggctcggtggtcccgccgggggccggcggcgggggaggcggcggggacgcgcggctcgccgccatggacgacaaggcgttcaccaaggagctggaccagtgggtggagcagctgaacgagtgtaagcagctgaacgagaaccaagtgcggacgctgtgcgagaaggctaaggaaattttaacaaaagaatcaaatgtacaagaggttcgctgtcctgttaccgtctgtggagatgtgcatggccaattccatgaccttatggaactcttcagaattggtggaaaatcaccagacaccaactatctattcatgggtgactatgtagacagaggatattattctgtggagaccgtgactcttcttgtagcattaaaggtgcgctatccagagcgtatcacaatattgcgaggaaatcatgaaagccggcagatcacacaagtatatggcttttatgatgaatgcctacgaaagtatgggaacgccaacgtgtggaaatactttacagatctctttgattatcttccacttacagctttagtagatggacagatattctgcctccacggtggcctctctccatccatagatacactggatcacataagagccctggatcgcttacaggaagttccacatgagggcccaatgtgtgatctcttatggtcagatccagatgaccgtggtggctggggcatttctccacgtggtgctggctacacatttggacaagacatttctgaaacatttaaccatgccaacggcctcacactggtgtcccgtgctcaccagcttgtaatggaaggatataattggtgccatgatcggaatgtggtcaccatttttagtgcacccaattactgctaccgctgtgggaaccaggctgctatcatggaattagacgacactttaaaatactcttttcttcagtttgacccagcacctcgtcgtggagagcctcatgtgacccggcgcaccccagactacttcctataaattcctccccaggacctgtctttgtatgttgaagtatacctggctttttaaaaaatatatatacatatatatatttaaaaacaacagttatctgtgtgtctctgtaacaaattgtgctatgtcttgacgttaaaacacatcatggaccaaaacgtgccatactaatggtgagccatcagcacggtgtgaacttgagtccactgtcctagccgagtcaaccaggcagccgcctgcccgcctgcctgctgtagtagccgtccttcgtgactggttaagggaaagggtcactggtggcttcatctcctttgcgcttacttggaaatttagttacaagtttaactggcatggattatagagttggagttttatttttaagaattgacaagctgacttccacttaaattcataaccctttattttgttgaaatgtatgactaactgaagaagagattcttggagtatgttgtcataacactaagatttcctttcaagtttcctgaactgaattactgttggatgttgacctgcacattctgtatatttgtcctgacagtgttgcatcctccttgctgtactgaacaaataaacttcccaatttagagag

SEQ ID NO: 85 - DNA, 1548 bp, Rattus norvegicus
  Genbank Accession No. NM_017068
gtcggtggtcgcccgtgctttcgctttctcagggctgtgagggtgttcgttggaattgtcggtccagtcgtcacttgtcctgagggatcacgatgcgccttcctctctccggttacggctcgaagctcgtcctgctctttctgttcctgggagcagttcggtccgatgcattgaaacttaatttgacagattcaaagggtacttgcctttatgcagaatgggagatgaatttcacaataacatatgaagctctaaaagtcaatgaaactgtaaccattacagtgcctgacaaggtgacatacaatggaagcagttgtggcgatgataagaatggtgccaaaataatgatacaatatggatccactctctcttgggctgtgaatttcaccaaggaagcatctcagtattttattaacaacatcacgctttcttacaacactaatgataccaaaacatttcctggtgctgtacctaaaggaatccttactgttatcattcctgtgggatcccagcttccattgggtgtcatctttaagtgcagtagtgttttaactttcaacctgagtcctgttgttcagcactattggggcattcacctgcaagcttttgtccaaaatggtacagtgagtaaacatgaacaagtgtgtaaggaggacaaaactgctaccactgtagcacccatcattcacaccaccgtgccatcgcctactacgacactcactccaacttcaatacccgttccaactccaacggttggaaactacaccatttctaatggcaatgctacctgtctgctggctaccatggggctgcagctgaacatcaccgaggagaaggtgcctttcatttttaacatcaaccctgccacaaccaacttcaccggcagctgtcagccccaaacagctcaacttaggctgaacaacagccaaattaagtatctcgactttatctttgctgtgaaaaatgaaaaacggttctatctgaaggaagtgaatgtcaacatgtatttggctaatggctcagctttccatgtttcaaataacaaccttagcttctgggatgctcctctgggaagttcttatatgtgcaacaaagagcaggtggtttccgtgtctcgaacatttcagataaatacctttaacctgaaggtgcaaccttttaatgtgacgaaaggagagtattctacagctcaagactgcagtgcagatgaagacaacttccttgtgcccatagcggtgggagcagccctgggaggagtacttattctagtgttgctggcttattttattggtctcaagcgccatcatactggatatgagcaattttagcacctacaatctgattgaatatattacaaaatacatacaaataacaaagttgtcttacctgtcagtttatgaaacactttgctacttaagacagactccttggaacttttatttggaaatcagtccccacaatttgagataaggctttttttgaaaaaaaacaaaaaacaacaaaaaaacaaaaaacaaaaaaatcattctctgatctgcttaaaatgca

SEQ ID NO: 86 - DNA, 2793 bp, Rattus norvegicus
  Genbank Accession No. NM_017073
acagccgagaatgggagtagggcggagtgtttgagcagcacacccatttcctctccgctcttcgtctcgttctcgtggcctgtccacccatccatcatctgccggccaccgctctgaacaccttccaccatggccacctcagcaagttcccacttgaacaaaggcatcaagcagatgtacatgaacctgccccagggcgagaagatccaactcatgtatatctgggttgatggtaccggggaagggctacgctgcaagacccgtactctggactgtgaccccaagtgtgtagaagagttacccgagtggaactttgatggttctagtacgtttcagtctgaaggctccaacagcgacatgtacctccatcctgtggccatgtttcgagaccccttccgcagagaccccaacaagctggtgttctgcgaagtattcaagtataaccggaagcccgcagagaccaacctgaggcacagctgtaagcgtataatggacatggtgagcagccagcgcccctggtttggaatggaacaggagtatactctcatgggaacagacggccaccctttcggctggccttctaatggcttccctggaccccaaggaccctattactgcggtgtgggagctgacaaggcttatggccgagatatcgtggaggctcactaccgggcctgcttgtatgctggaatcaagatcacagggacaaatgccgaggttatgcctgcccagtgggaattccagataggaccctgcgaagggatccgcatgggagatcatctctgggtagcccgttttatcttgcatcgggtatgcgaagactttggggtgatagcaacctttgaccccaagcccattccagggaactggaatggggcaggctgccacaccaactttagcaccaaggccatgcgggaggagaatggtctgaggtgcattgaggaggccattgataaactgagcaagaggcaccagtaccacatccgtgcctacgaccccaaggggggcctggacaacgcccgccgtctgactggattccacgaaacctccaacatcaacgacttttccgctggcgttgccaaccgcagcgccagtatccgcattccccggattgtcggccaggagaagaagggttactttgaagaccgtcggccttctgccaattgcgacccctatgcggtgacggaagccatcgtccgcacgtgtctcctcaacgaaactggcgacgagcccttccaatacaagaactaagcggactcgacttccagtgatcttgagcccttcctagttcaccccactcccaactgttccctctcccactggtccccactgtaactcaaaaggatggaataccaaggtctttttattccttgcgcccagttaatttttgcctttattggtcagaatagaggggtcaggttcttaatctctacacacccaaccccttctttcctagctagctttccagtgggggaacgggagggggtggggaagggtaacccaccgcttcatctcagcgggaatgcatgtcctgtaggcatagctgtcacaaatcgggtgtacttgtggtgagggaggactggttttttttttccttcaggataattgaaagggcaggcccaacagcttagattaacattttctctgtcagtagagagctgttatttcttccggtgaaaccagctttctattgaagtctggtgaggagttggaggttggtctcttggcttccttagcttagggaaggggagttcaccctcccttcatgaaacacagttcacctgacaaatggccctactgtaaaggaagaaaaaagtttcttggtcctccatttataactcaaagcagagtagtatttttatatttaaatgttaaaaacaaaaaagttatatatatgggtgtgtggatatatatgtcttttctaattgagaaaaccatcctattccctgggtgccaagtttgagtgaggagctcggtgtagaagtgaggcactcttgaggtaggggtggggatgcagtactgggaaagttggttatcttgggggttcagcttcattactacttagggtttccctgcccactctgcaggagcagatgttggacaggtagccagtgggatgccactgcttgccgccactgtccctgggcttagtttaaggggacgtgtatacctaatccacacacgagttagaagtatgagttggctggtcaacttgaacattgttacaggcgggtgggtgttagtggggggttattttttggtgggactagcatgtcactaaagcgggccttttgatatattaaattttttaaagcaaaacaagtttagattttaatcaagttcgtagggtttctaactttacagaattgcctgtttgtttcaatgactccttccacttggctcttaggggaactgaggacaggcctggagttaatacacttgtcattctgtgtcctagtgtcctcttcctccggcagactgtccccttccttctgaaaaagccgatagagtcttgttttatttttcttttataataaacacaccccacctccatcccagcttgttgccttgcagttttctggatgtttgtgtcggcagcaggcagctgtggtttttttctcttgccacgatgactctaattaccatgtatagtatgttcagttagataactcactgtaaacagactgtaactgagagcagagcttgtaaatcaacctaacgtttataagatttcctctgacttgtttctttgtggttccaaaaaaaaaaaaaaaaaaaaaaacctcaaaaact

SEQ ID NO: 87 - DNA, 2446 bp, Rattus norvegicus
  Genbank Accession No. NM_017087
ccaggagtgagcagctgctcccggttggccctgacggacagacaaaccgacagcctgacatcctagtccaccaactaaccagcctgtacctggctgcttccccctccccaggaacattgaccatgcgtcccctgtggctactcaccttgctgctggctctgagccaggccttgccctttgagcagaagggcttctgggacttcaccttggatgatgggctgctcatgatgaatgatgaggaggcttcaggctcagacaccacttcaggtgtccctgacctggactctctcacacctaccttcagtgccatgtgtccttttggctgccactgccacctgcgggttgttcagtgctctgacttgggtctgaagactgtgcccaaggagatctcacctgataccacactgctagacctgcagaacaatgacatctctgaactccgcaaggatgacttcaaaggcctccagcacctctatgctctggtcctggtaaacaataagatctccaagatccatgagaaggcctttagccctctgcggaagctgcagaaactctacatctccaagaaccacctggtggagattcctcccaacctgcccagctccctggtagagctacgaatccatgacaaccgtatccgcaaagtgcccaagggcgtgttcagtgggctccggaacatgaactgcattgagatgggtgggaatcccctggagaacagtggctttgaacccggagcctttgatggcctgaagctcaactacctgcgcatctcagaggccaagctcactggcatccccaaagatctccctgagaccctgaatgaacttcacttggaccacaacaaaatccaggctatcgagttggaggatctacttcgctactccaagctgtacaggctgggcttaggacacaatcagatccgaatgattgagaatgggagcctgagttttctgcctaccctgagggaacttcacttggacaacaacaagctgtcccgggtgcctgctggcctcccagatctcaaactcctccaggttgtctatctgcactccaacaacatcaccaaggtgggcatcaacgatttctgccccatgggctttggagtcaagagggcctactataatggcatcagcctcttcaacaaccctgtgccctactgggaagtgcagcctgccaccttccgctgcgtcactgaccgcctggccatccaatttggaaattataagaagtagaagcagtggtagccaccatggctcgttggtgagagtctctgaggaacatagccagttgttccacaggggaaggggaacaaagaagcaacacctttgttccccaatattaactcactgcccaccacagcttcctctggctcctaagcatgcacatatgcacatggcctggcctctcccattcccctcagcctttgagatttaacactcacccaccatgtccactcagagactccctataaatcttttttcttgctcatcctgaaactcagatgtttgtgggaagaatggacagagcacatggccacagttactgttccatccgggcatgtattcctcctcttccttacccatgtctgacttctagctctcctgggctctgctgctgcccttatcctctggtgatctctcttcaacaagttcactacctgtccatccaagccgccacctggctctactaactcctggatccttccctctctccaactctgttatgcttcctggcacttttcttccttctggggttatagatctgtccctgccatctctggacctggttcatatctttctgtctttgtctctttctgtatttctttgcctatatctctgtctgtctctatttctgtttctgtctctctgtctttatatctgcctctctctctctctctctctctctctctctctctctctctctctcacacacacacacacacacacacaaacacacaaacacaaacacacacacacacacacacacacacacacacacacacacacacacacacacaccgtcttctccaggctgctttctgtttcacaggtctctggccagtccctgcacaaacaaatatagggaaactattttcctgactgccctacctggcacttgatctcccatccctggaggaagctggaagctggaggcccagaatcctatccatattgtccaggaaagggtccatactctgttatcaagatgaggatcaggaagcttcctagcccctggagaggctcagcaggccaccagaggcccccaccccgaaccagtttgcattggcccctgccctctccccaagatggctaggtcccctccctcacccctgggtccctgctgtggcaggaggtggtggtcagttgtacccagcaggagggagtgctgcttatgaggtcagttgtctctcaattaaagaaacactgtgcaataaaaaaaaaaaaaa

SEQ ID NO: 88 - DNA, 4775 bp, Rattus norvegicus
  Genbank Accession No. NM_017090
gaattccggattacagacacgtatgtcatatggatgttggagatttgaactcaggtcctcatgtttgggtggtaagtggttctaaccactgagctgtctcaccagtctcagtggggtacccacactgaccactctccgcccactcctgaaatgccctttgttctccccatccctacgctatctctgagagctcacccccatacccttctgttctcacacacagccttccaggcgtctctcagtgcctgccagccgaccccaaggcgaaggagcatgcagtgctcagcccggggagtcctcgaagcgaagacacctgcaccggatgcccctggcctcccgtgaccgcatcatgatgctgggccactcgtgtctttgagtcagtagaagcagatcttcatcagtccacatcaacaccggctaataaggaggaaaccactgccaagctccaggaacaccatgttctgcaggaagttcaaagatctcaagatcacgggggagtgtcctttctccttactggctcctggtcaggttcctacggagccaatagaggaggtggccggagtctctgagagctgccaggccactctgcccacctgccaggagtttgctgagaatgcagaagggagtcacccccaaagaaagacaagccgcaacagagtctacctacacaccctggcagagagtattggcaagctcattttcccagagtttgagagactgaaccttgcacttcagagaacattggcaaagcacaaaataaaggaaaacaggaattcttcagaaaaagaagaccttgaaagaataattgcagaagaagcaattgcggcaggtgtcccagtggaggtgctcaaagactctctgggtgaggaactgttcaagatctgttatgaggaagatgagcacatcctgggcgtggttggcggcaccctgaaggactttctcaacagcttcagcacgctcctgaagcagagcagccactgccaggaggcggagaggcgggggcgactggaagatgcctccatcttgtgcctggacaaggaccaggactttctaaatgtttactacttcttcccgaagagaaccacagccctgcttctccccggtatcattaaagcggctgctcgcatactgtacgaaagccacgtggaggtgtccctgatgcctccctgcttccgaagtgagtgtaccgaattcgtgaaccagccctatttgctctactcggtccacgtgaagagcaccaagccttctctgtccccaggcaaaccccagtcctcgctagtgatccctacttcgctcttctgcaaaactttcccattccacttcatgctggaccgtgacctggccattctgcagctgggtaatggcatcagaaggctggtgaacaagagggacttccaagggaagcccaactttgaagagttctttgaaattctaactcccaaaatcaaccagacatttagcggcatcatgacaatgttgaatatgcagtttgtcatacgggtgaggagatgggataacttagtgaagaaatcttcaagggttatggacctcaaaggtcaaatgatctacatcgttgaatccagtgccatcttgttcttagggtcgccgtgtgtggacagattggaagatttcacaggacggggtctctatctgtctgacatcccgattcataatgccctgagggatgttgtcttgataggggaacaggcacgggctcaagatggcctcaagaagaggttgggaaagctgaaggcaaccttggagcatgcccaccaagccctggaggaggagaagaagaagacggtagatctcctgtgttctatctttccctctgaggttgctcagcagctctggcaaggacaaattgtgcaagccaagaagttcaatgaggtcaccatgctcttctcagatatcgtagggttcactgccatctgctctcagtgttcacctctgcaggtcatcaccatgctcaacgctctctatactcgctttgaccaacagtgtggagagctggatgtctacaaggtggagaccatcggagatgcatattgtgtggcagggggattgcacagagagagtgacacacatgctgtccagatagcactgatggccctgaagatgatggagctctccaatgaggtcatgtctccccacggagaacctatcaagatgcgaatcggactgcattctgggtcagtgtttgctggagttgtcggagtgaagatgccccgatattgcctgtttggaaacaatgtcactctggctaacaaatttgagtcctgcagtgtgcctcggaaaatcaatgtcagccccacgacatacaggttactcaaagactgtcctggctttgtgttcaccccgagatcgagggaggagcttccaccaaacttccctagtgacattcctggaatctgtcactttctggatgcttatcaacatcaaggacctaattctaaaccatggttccagcagaaagatgcagaagatggaaacgctaacttcttaggcaaagcatcaggggtagattagtgagccgcatgtttctgtgtttgatgcctttgaggggtgctcagaatctctgaaatgactttaggattgcagaagataaaaaactgtgttaaaattgcaggggtgaaacccagtttcctctgtttcccatttaagatggaaaaaaaaaagtattcaatgcttcagcgctttcaaccttcttctctatttaagaaacaaacctcaaaagtgacttgtgacttttggggacatagctttgttctagagcagtcactacctgcactcgaaatccaacacagtgtacatattccagacaattgtagtcaagtttaagtgtcaaagtaatgtactcacctgtggcctgtgaccagtgcaaactgtggttattacagtgtgtctgtggtagtgttgcctgtaaatctctgaatagaaatgacagtgtttaattctgcaagagcttccagcctcttgactctacattcaattaggtttccttattctatcctggcgtatgtaacacaataggccagcgccttcttcccagctacatctttgtgcctatgtacgtgttttcctttcctttcctttcctttcctttttttttttaagaaaataagcaattagacataggataaaatgtgatataaagtagttcagtaagtgtcaaagaatattttcatgttttgtcattaaagatattatctatagcacaatatataatacaacaaatacttttcattttgatcctatctgtgataaaacattttaattaatagtaacaatgtactccctactaatccatgtaaaatttactaatagcaaaactttcagagtaaaagtatttacatacattgttaaaatgcaataacattcaaatttaattaaggcatagaattaatatttgcacacagagagcctactgtagaggacagtggcaaagtgttcacaaacacacgtgtttaaatgatcctctactgccgtgttgagccataaaagccaaggggaaaagttttaagttagaagtagaaaaatagacttcattttgtctttttttgataccttcttaagtatttctactgaccatttagtgtatgtgtatgtgttaagaatcaaaatttttattactcagtgtacacctgtgagtattattctactttaaatatactaatattttctacagaaaccactagtatcattgaagaaaatgtctatgatttcattatagagatcctgatacgtttttttttttcttctggagtttaaactaatgtcctttccttcccctgccctcctccgcagtcctctttcttcctctcccattaggcatgtttgtgtgattctgtgggctgacacaggaaactgtgcatgctgggtaaagactgttactgagtaacttcctcaccatgaggcttcagttttattgctaatggtgacagtttacattcccgagtgttaatttggtaaaaggaagtgactttaaaagaagaccaacttcaaagccaagagagatagacataattgaatttttcaatcagtattagtagaacgctagacattctgaatttctatgtgtgtagttgaaaagaaactcagtttaaaagtcattttctacctccaatagtcttcaagcatccagagcaacagacatcttttacctagctctagtttccaagggggacaactaaaccacccaatggatttctttaaaggcggatattgtctcattaaacagtcacactgatgttggatagtgtcacgggccctgcaaaggtgtatttaggatgtcacaatgatgtggaattcaatgaatatttattaaggaggtaaagaggtaaataccccctctttctggaactaatattcaatacaggggaactagtaggaatcacagacaattagaaagcgtaaaacaggatgtcatcctcttaagctgtgcagttaggtggttgctacattagtaataatctgattcagaagcttgcacattaattagaattaattctcccactgtcttttagggatggtgatagaactcaatgacaaagcacctgcctagcatttaggcagtcctgttctgacccaagcagcatgaaggaattacatgtatctctcatgtgcatatgatgtatgatcacactcacctgtgtcacctgtgtacacacctggggcaaatggaggaactgtatctaattcaaggcaaactaccggagctccatgtacggttcctataacttttctattattttgtcattttagcaaaaaaaaaa

SEQ ID NO: 89 - DNA, 860 bp, Rattus norvegicus
  Genbank Accession No. NM_017125
ggctgctgagccgcggtaggagagcatcaagaagcgtcggggagcgcaggcccagcagccatggcggtggaaggaggaatgaagtgtgtcaagtttttgctctacgttctcctactggccttttgcgcctgcgcagtgggattgattgccattggcgtagcagttcaggttgtcttgaagcaggccattacccacgagactactgctggctcgctgttgcctgtggtcatcattgcagtgggtgccttcctcttcctggtggcctttgtgggctgctgtggggcctgcaaagagaactactgtctcatgattacatttgccatcttcctgtctcttatcatgctcgtggaggtggcggtggccattgctggctatgtgtttagagaccaggtgaagtcagagtttagtaagagcttccagaagcagatgcagaattaccttacagacaacaaaacggccaccattttggacaaattgcagaaggaaaataaatgctgtggagcctctaactacacagactgggagcgcatccccggtatggccaaggacagggtccccgattcttgctgcatcaacatcactgtgggctgtggaaacgatttcaaggaatccaccatccatacccagggctgcgtggaaactatagcggcatggctgaggaagaacgtactgctggtggctggagcagccctgggcattgcttttgtggaggtcctgggcattatcttctcctgctgtctggtgaagagtatccggagtggctacgaagtaatgtagggtgggggcgtgtctgagctcgtctgtcttttcatggagtggactctccaggttttcaattaaacggattattttttcagacc

SEQ ID NO: 90 - DNA, 838 bp, Rattus norvegicus
  Genbank Accession No. NM_017126
gggacccaggggacccttggcactgcgcaggaccccgcgggacccggaaccttccgacagggttatggcggccgctccgggcgcccgactcctgcgcgctgcctgcgcctccgtcgcttttcgtggtctggactgccgtcggctgctggtctgcgggacccgtgcgggacctgccgtccctcagtggaccccgagcccccacacgcttgcagaggccggacctggccggccactgagcgtgtctgcgcgcgcgcggagtagctcagaagataaggtaacagtccacttcaagaaccgagatggtgaaacgctaacgaccaaggggaaagttggtgactctctgctagatgttgtgattgagaataacctagatatcgatggatttggtgcgtgtgaggggactttggcttgctctacctgtcatcttatctttgaggaccatatatatgagaagttagatgccattactgatgaagagaacgacatgcttgacctggcttttggactaacaaacaggtcacggctgggctgtcaagtttgtctgaccaaggctatggacaatatgactgtccgtgtgcctgaagcagtggcagatgtccgacagtctgttgacatgagcaagaattcctaagctacaataaaaagaatattttcattaaatttttacctatttttataattatttcttagcataattgattatatggccaaaatatgtagctgtgctgtcttagttcagttttgtagtactgaaaatttgcagtttttattttgattaaattattaaaatatcagtctattagaagacagctgatacaataaactccttatgtatttt

SEQ ID NO: 91 - DNA, 1018 bp, Rattus norvegicus
  Genbank Accession No. NM_017138
gctggaacgggtccgtacggcgttgttcttggttcccatcgtaacttaaaagggaaacttacacaatgtccggaggccttgacgtcctgcagatgaaggaggaggatgtcctcaaattccttgctgcaggaacccacttaggtggcaccaaccttgactttcagatggagcagtacatctacaaaaggaaaagtgacggtatctacatcatcaacctgaagaggacttgggagaagctgttgttagccgctcgagctattgttgccattgagaaccctgctgatgtcagcgtcatctcctccaggaacactggccagcgagctgtgctgaagtttgccgctgccacaggagccactccaattgctggccgcttcacacctgggaccttcactaaccagatccaagcagccttcagggagccccggcttctagtggtgactgatccccgggctgaccaccagcccctcacagaggcctcttacgtcaacctgcccaccattgctctttgtaacacagattctcccctgcgctatgtggacattgccatcccatgcaacaacaagggagctcactcagtgggtctcatgtggtggatgctggccagggaagtactccgcatgcgaggaaccatctcccgggagcacccatgggaggttatgcctgatctttacttctacagggacccagaggagattgagaaggaggagcaggctgccgctgagaaggctgtgaccaaggaggaattccagggtgaatggacggcaccagcgcctgagttcactgctgctcagcctgaggtggccgactggtctgagggtgtgcaggtgccctctgtgcccattcagcagttccccacagaagactggagtgcacagccggccactgaggactggtcagcagctcccacagcacaggctactgagtgggttggagccaccactgagtggtcctgagctcctctgcaggtgcctgagcgaagggaaaaaaggtggaaggaaaataaagttcctgaaagctg

SEQ ID NO: 92 - DNA, 3298 bp, Rattus norvegicus
  Genbank Accession No. NM_017141
cggcaccatgagcaaacgcaaggccccgcaggagaccctcaacggcggcatcacggacatgctcgtggaactcgcaaactttgagaagaacgtgagccaggcgatccacaagtacaatgcatacagaaaagcagcatctgtgatagcaaagtacccacacaaaatcaagagtggagcagaagctaagaaattgccaggagtaggaacaaaaattgctgaaaagattgatgaatttttagcaactggaaaattgcgtaaactggaaaagattcgtcaggatgatacaagttcatccatcaacttcctgactcgagttactggcatcgggccatctgctgcaaggaagcttgtagatgaaggaattaaaacattagaagatctcaggaaaaatgaagataaattgaaccaccatcagcgaattgggctgaaatattttgaggactttgaaaagagaattcctcgtgaggagatgctgcaaatgcaggacattgttcttaatgaagttaaaaagctggatcccgagtacatcgctacagtctgcggcagtttccgaagaggcgcagagtccagtggagatatggacgttctgctgacccacccaaacttcacgtcagaatcaagcaaacagccaaagttgttacatcgtgttgtggaacagttacaaaaagtccgtttcattacagatactcgttcaaagggtgagacaaagttcatgggtgtttgccagcttcccagcgagaatgatgaaaacgaatatccacacaggagaatcgatatcaggttgatccccaaagatcagtactactgtggtgttctctacttcactggaagtgacatctttaataagaatatgagagcgcatgccctggaaaagggcttcacaatcaatgagtacaccatccgccccctgggggtcactggggttgctggggagccccttccggtggacagcgagcaggacattttcgattacatccagtggcgctaccgggagcccaaggacaggagtgaatgacgcctgccccacccaggcctatcccacgaggagtcctaagttattgcttaacctttgctatgtaagggttgggtgttttaggtgattgcctcttctctgtgcttcccatggactatcgtcaatgaacctcttgagcagctattcagtattttcttagcacatgtgtttaaacttagatatgtttgtgatcgcagtaccatggtttactagagaaacgtaagagccgatgtgataagcagtgtttaatgacctttcacttccacctcacattgcagccacagtcggccccacttgtccctatccaccctttatgggtcagctggtctcccagagccatctccagaagtcacttcattatccttagaaacaaggggcttccaggcatggtggtgcacatccttaatcccaggacttgggaggcagagacaggcagatctctgtgagttcaaggccagcccagactacatactgaattcagggtgccagagctacatagtgaggccctatctaaaaagaaaggggccttcatagctgtaagacttctgtgaccatttcccatttgcagtgtatactgataactagaagacagtgtgtgctttacctcaggggcagccttcccctcacagctcaatggcacctaactagcattcatcagtcgtctggtggacagtccactgtttatcaaataacattctgtgacacgaacaaagaacttcaagtttaagaaagatttatttgagcagattgagccactgtgtctggatggctttattgtagagtcctgtcatgttgtagatggtagtcacaaagtcagaagtaactcatcacagcgtctggtcactgtcagttgctagaagattcagctttatttatgtgctgggtataatgtacttgcctgtaatcccaagactcactcgaggcaagaggaacatgagttcgaagcccaccctgggctatatagcttactctgagaccctgtctcagaacccttacccctccccccaaaaattatccaggaggcagaggcaggtgggtctctatgagtgtaaggccagccagggctacacagcgagaccactgtctcagaaaacaaaataaaaaatagaataaaattagtgccagggattctgtgtgaacacgagggacaagtcccatgtctgtacaacttatattctttggcatactcttagccttgtatgttgtcggttaccagtcacctgacttcgacaggacagtccagggaccacagtcacagcgctggaagatttctggggcttgggcagtgtctttgtgccccctcctggaacacacttgtccctctagtagaactggcttgcaaattttggtccaaaaatggcgagcacagcaaagtccagggccgcagtcggaggttctgagacagctttctccctcctgtcctgtaacaaggtaggctcaggctctagaggtggcagatgggttaagggtgtgtgtgtgtgtgtgtgtgtgtgtgtgtgtgtgtgtgtgttatactaatgggttgagattgggatctaggaatgaaggcctatatagcctatatataaactagcaaagccaacaggacacaggtctcacagaataagggaaattagagccctactgaacaaagacatcaaggaatgattatctaccctgagaaataggtagcactccacaaagtttgctaatacagtttttcgtgagcatcgattcctttacttataaaggggccagctagtccaatatgtgagtaggagcggctgttgtacctctccactttcaaatactctgttattcaagactttaactcgagactcctatttttgtttaaaagaatttttgtaaatccccaagtgtggtggcagacacctttaatcccagcagaagccgtcgggtctctgagttcctgaacagtctggtctacacagtgagttctaggatagcagagctacagacccttttgtactatgtacaagtctggagtgaatgcatcttctttaatccactctgtatgctgaggctataggaaaggtacgtggcacttggtacaccccagcttagggaaagccatcggttggaggtttccttcctaagctgtcatcactagggtcttgccctggcctggccaatagagtcccttgaattgctccaagagctcacagacatgaggtaaaggagtttagcttcagcctgtggggctgggagggagaaaatggtttttaaaataaaatatgctctccttaaaaaaaaaaaaaaaaaaaaaaaaaaaaaaaaaaaaaaaaa

SEQ ID NO: 93 - DNA, 830 bp, Rattus norvegicus
  Genbank Accession No. NM_017144
cgcttgagcagcacagaggggacccaaccctccaaggtcaccagggacacccttctaagaccctccaggaatctgcaatcccattctctacctctggagatcagcatggcggatgagagcagcgatgcggctggggaaccccagccggcgcctgctcctgtccgacgtcgctcctcggccaactaccgagcctatgccaccgagccacatgccaagaaaaagtctaagatctccgcctccagaaaacttcagttgaagactctgatgctgcagattgcgaagcaggagatggagcgtgaggcagaggagcgacgtggagagaagggccgcgttctgagcacgcgttgccagcccttggtgttggatgggctgggctttgaagagcttcaggacctatgccggcagcttcacgctcgtgtggacaaagtggatgaagagagatacgacgtggaagcaaaagtcaccaagaacatcactgagattgcagatctgacccagaagatctatgacctgcgtggcaagtttaagcggcccactctccgaagagtgagaatctcagcagatgccatgatgcaggcactactggggacccgggccaaggaatccttggacctgagggcccacctcaagcaggtgaagaaggaggacattgagaaggaaaaccgggaggtgggagactggcgcaagaatatcgatgcactaagtggaatggaaggccgaaagaaaaagtttgagggctgagcccatggctctcacactgtgctctgaagggcatctctgaggaataaatttctttaaactggaaaaaaaaaaaaaaaaaaaaaaaaaaa

SEQ ID NO: 94 - DNA, 1039 bp, Rattus norvegicus
  Genbank Accession No. NM_017147
gaaacatggcctctggtgtggctgtctctgatggagtcatcaaggtgttcaatgacatgaaagttcgcaagtcttcaacgccagaagaagtgaagaaacgcaagaaggcagtgctcttttgcctgagtgaggacaagaagaacatcatcctggaggagggcaaggagattctggtaggagatgtggggcagactgtggacgacccctacaccacttttgtcaagatgctgccagacaaggactgccgctatgctctctatgacgcaacctatgagaccaaggagagcaagaaggaggacctggtattcattttctgggcccccgagagtgcaccccttaagagcaaaatgatctatgccagctccaaggatgccatcaagaagaaactgacaggaatcaagcacgaattacaagctaactgctacgaggaggtcaaggaccgctgcaccctggcagagaaactaggtggcagcgccgtcatttccctggagggcaagcctttgtgagccacctccagccccctgcctggagcatctagcagccccagacctgctcttgggtgttgcaggctgcccttttcctgccagaccggaggggctgggggggttccagcagggggagggttttcccttcaccccagttgccaaacatccctcccaccccctggaccgtccttttccctccatccctgacggttctggccttcccaaactgcttttgatcttctgattcctcttgggttgaagcagaccaagtcccgtcctaggcacccagtttggggggagcctgtatttttttttttaacgacacccctactcctgatctgtcccatcccatgctgccaacttctaaccacaatagtgactctgtgcttgtctgtttagttctgtgtgtaaatgaactgtggaaatgaccctccctgcaccagctggttgccctcccctttccctttgatcttggccactcatggaagcaggaccagtaagggaccttcaatttaaaaaaaaaaaaaaacacaataaaaaggctaattaacaaa

SEQ ID NO: 95 - DNA, 630 bp, Rattus norvegicus
  Genbank Accession No. NM_017150
tcttccggtcccaggcgctcggggagccgcggcttaccgtgcagacatggccaagtccaagaaccacaccacacacaaccagtcccgcaaatggcacagaaatggcatcaagaaaccccggtcacaaagatacgaatctcttaaaggggtcgaccccaagtttctgaggaacatgcgctttgccaagaagcacaacaagaaaggcctgaagaagatgcaggccaacaatgccaaggcagtgagtgcacgagcagaggccatcaaggccctcgtgaagcctcaggctgtcaagcccaagatgccaaagggctccagccgcaaactcagccgtctggctttcatcgctcaccccaagcttgggaagaagattcgaagctacatggccaagggtcgtaggctctgccaaccaaagcccaaggttcaaaccaaggcagaggccaaagctccagctaaggcccaggccaaagctccagcccaggctcccaagggtgcccaggcccctgtgaaggccccatagaacaggctcctgccagtgtgaagacagacagactgctgtgacacacccacctacacactatctgcagatgaccagtgtcctatgctgtttttacaaataaacttgagacaaga

SEQ ID NO: 96 - DNA, 487 bp, Rattus norvegicus
  Genbank Accession No. NM_017151
tttttcccagcagccgccaagatggccgaagtggagcagaagaaaaagcgaaccttccgcaagttcacctaccgtggcgtggacctcgaccagctgctggacatgtcctatgagcagctgatgcagttgtacagcgcccggcagagacggcgcctgaaccgaggcctgcggaggaagcagcactcactgctcaagcgcctgaggaaggccaagaaggaggcgccacccatggagaagccggaggtcgtgaagacccaccttagggacatgatcattctgcccgagatggtcggcagcatggtgggtgtgtacaacggcaagaccttcaaccaggtggagatcaaacccgagatgatcggccactacctgggcgagttctccatcacctacaagcctgtgaagcacggccggcccggcattggtgccacccactcctcccgatttatccccctcaagtagtggggacaataaagactcgttttcagcc

SEQ ID NO: 97 - DNA, 4198 bp, Rattus norvegicus
  Genbank Accession No. NM_017154
agagctcagtgactccagcagccacgatgactgcggatgagttggtcttctttgtgaatggcaaaaaggtggtggagaaaaatgcggaccctgaaacaacacttctggtctacctgagaagaaagttggggctatgtgggaccaagcttggctgtggagaaggtggctgtggggcatgcaccgtgatgatctccaagtatgaccgtcttcagaacaagattgttcatttttctgtcaatgcctgcttggctcccatctgctccttgcaccatgttgctgtgaccaccgtggaaggcataggaaacacccagaagctgcatcctgtacaggagagaattgccagaagccatggttcccagtgtgggttctgcactcctggcattgtcatgagtatgtacacactgctccggaaccagcctgagcctactgttgaggagatcgagaatgccttccaaggaaacctctgtcgctgtacaggctacagacccatcctccagggattccggacctttgccaaggatggtgggtgctgtggagggagtggaaacaacccaaactgctgtatgaaccagacgaaagaccaaacggtttctctctcaccttctttattcaacccagaggatttcaaacctttagatcccacgcaagagcccatcttccccccagagttgctgaggctgaaagacactccccagaagaagctgcgttttgaaggggaacgtgtgacctggatccaggcttcaactatggaggagctgcttgacctgaaagctcagcaccctgatgccaagctggtggtgggaaacacagagataggcattgaaatgaaatttaagaatatgctatttcctctgatcgtctgcccagcctggatccctgaactgaattcagtggtgcatgggcctgagggaatctccttcggagcttcttgcccccttagcttggtggaaagtgtcctggcggaggagattgctaaacttccagagcaaaagacagaggtgttcagaggcgtgatggagcagctgcgctggtttgccggcaagcaggtcaagtccgtggcgtccatcggagggaacatcatcactgccagccccatctctgacctcaaccctgtgttcatggccagtggagccaagctgactctggtgtctagaggtaccaggagaactgttcggatggatcataccttcttccctggctacagaaagactctgctcagaccagaggagatattgctgtccatcgagatcccctatagcaaggagggagagtttttctcagccttcaagcaggcctccaggagggaagatgacattgccaaggtgactagtggcatgagagtcctgttcaaaccggggaccattgaagtgcaggaactgtccctttgcttcggagggatggccgacagaactatctcagccctcaagaccactccgaagcagctatcgaagtcctggaatgaggagctgctgcagagcgtgtgtgccggcttggcagaggagctgcagctggcccccgatgcccctggtggtatggtggaattccggcgcaccctcaccctcagcttcttcttcaagttctacctgacagtgctccagaagctgggcagagcggaccttgaggatatgtgtggtaaactggaccccacctttgccagtgccaccctgctctttcagaaggaccctccagctaatgtccagcttttccaagaggtgccaaaggatcagtctgaggaggacatggtgggccggcccctgcctcacctggcggcaaacatgcaggcatcgggagaggccgtgtactgtgatgacattccccgctatgagaatgagctctctctcaggctggtcaccagcacccgggcgcatgctaaaatcacgtccatcgacacttcagaagccaagaaggtgccagggtttgtttgcttcctcaccgcagaggatgtccctaatagtaatgcaaccggccttttcaatgatgaaactgtctttgcgaaggatgaggttacttgtgttgggcacatcattggtgctgtggtcgctgacaccccagaacacgcacagagagctgcgagaggggtgaaaatcacctatgaagatcttccagccattatcacaatccaggatgctataaacaacaactccttttatggctctgagataaaaattgagaaaggagatctcaagaaaggcttttcagaagctgacaatgttgtctcaggagagttgtatatcggtggccaggagcacttctacctggagaccaactgcaccattgccgtgccaaaaggcgaggcaggcgagatggagctgttcgtgagcacacagaacaccatgaaaacccagagctttgttgcaaaaatgttgggcgttccggacaacagaatcgtagtccgagtgaagaggatgggtggaggctttggagggaaggagacccggagcactgtggtgtccacagcactggccttggctgcacacaagactggccggcccgtacgttgcatgttggaccgagatgaggacatgctgataactggtggcagacatcccttcctggctaaatacaaggttggcttcatgaagactgggactgtagtggctctcgaggtggctcacttcagcaatggtggtaacactgaggatctctctcggagtataatggaacgagctttgttccacatggataacgcctataagatccccaacattcgaggcactgggaggatttgcaagactaatctgccctccaacacagccttcagaggttttgggggtcctcaggggatgctaatcgcagaatactggatgagcgaggtcgccataacctgtgggctgcctgcagaggaggtacggaggaaaaacatgtacaaagaaggggacctgactcacttcaaccagaagctggaggggttcaccttgcccaggtgctgggatgaatgcatcgccagctctcagtatcttgctcgcaagagggaagtggagaaattcaacagggagaattgttggaaaaagagagggctgtgtataatcccaactaagtttggaataagctttacacttccttttctgaaccagggaggcgctctggttcacgtgtacactgatggttcggtgctgttgacccatggagggactgagatgggccaaggccttcacaccaagatggttcaggtggccagcagagctctgaaaatccccacctccaagattcatataagtgagacaagcactaacaccgtccccaacacttctcccacagctgcctctgccagtgctgacctcaatggacagggtgtttatgaagcatgccagaccatactgaaaaggctggaacctttcaagaagaagaaacccaccggcccctgggaggcatgggtgatggacgcctatacgagcgcagtgagtttgtccgcaactggattttataagacacccaaccttggctacagctttgagacaaactccggaaatcccttccactatttcagttatggggtggcttgctctgaagtagaaattgactgcttaacaggggatcataagaatctccgtacggatatcgtcatggatgttggttccagcttgaatcctgccattgatattggacaagtagagggggcatttgtccagggccttggtctcttcactatggaggagctgcactactcccctgaggggagcctgcatactcgtggccccagtacctacaaaatccctgcatttggtagcatccccattgagttcagagtatccctactccgggactgccccaacaagagggccatctatgcatccaaggctgttggggagccacctcttttcctggcttcctctatcttctttgccatcaaagatgccattcgtgcagctcgagctcagcacggagataacgcaaaacaacttttccagctagacagccctgccactccggagaagatccgaaacgcctgtgtggaccagttcaccaccctgtgtgtcactggagtaccagaaaactgtaaatcctggtctgtgaggatctgaagagaaggtctccaccattggtttgtaccgcaccaggattccttggagccacaagcacatcctgtagtatccagatttccgcatgccgcgtgggactcagcaggatgacattttcaggaagatggacattttgacccaaataagagctgcaaacaaaccaataagcaaatggggag

SEQ ID NO: 98 - DNA, 801 bp, Rattus norvegicus
  Genbank Accession No. NM_017160
gtcggctgtgtcaagatgaagctgaatatctccttccctgccactggctgtcagaaactcatagaagtggatgacgaacgcaagcttcgtacgttctatgagaagcgcatggccacagaagtagctgctgatgctcttggtgaagagtggaagggttatgtggtccggatcagcggtgggaatgacaaacaaggttttcccatgaagcaaggcgttttgacccatggcagagtgcgcctgcttttgagtaaggggcattcttgttatagacctaggagaactggagagaggaagcgcaagtctgtccgaggatgcattgtggatgccaacctgagtgttctcaacttggttattgtaaaaaaaggagagaaggatattccaggactgacagataccactgtgcctcgtcggttgggacctaaaagagctagtagaatccgaaagctttttaatctctccaaagaagatgatgtccgccagtatgttgttagaaagcccttaaacaaagaaggtaagaagcccaggaccaaagcgcccaagattcagcgtcttgttactccccgtgtcctgcaacacaaacgccgacgtattgctctgaagaagcaacgcactaagaaaaacaaggaggaggctgcagaatatgctaaacttttggccaagagaatgaaggaagccaaagagaagcgccaggaacagattgccaagagacgtaggctgtcttcgctgagagcttctacttctaaatctgagtccagtcaaaaataagtctttaaagagtaacaaataaataatgagaccttg

SEQ ID NO: 99 - DNA, 1353 bp, Rattus norvegicus
  Genbank Accession No. NM_017180
gagcgcctctcggagctgggttttcccccgcggcgcgggagccaggagccgccttttccgctgggtgtcactcgggggtggggagggtggcccattgaaaagcgctgcgaggggccccggccagtgcccttcagtgagcgctccgcggaagacggcagagagcagcccgctcacggctccgggatcttgtggcgggtcaggactcgcctgtccctctgccgggaccccgagccaccgccgccaccgccaccgctctgtctcctgcgagtcagccttctctgtgcgctccgggcaggcggccgcggaagccgctggagcgaggacagcgcacggctgctactgctacccccagccggagcgtctggaagcctaaaggccgagcggagcagcagcaccccttatgccggaaggatgctggagagcagcggttgcaaggcgctgaaggaaggagtgctggaaaagcgaagcgacgggctgctgcagctctggaagaaaaagtgctgcatcctcactgaggaagggctactgctcataccgcccaagcaggtacaacatcagcagcagcaacagcagcagcaacagcccgggcaggggacagccgaaccgtcccaacctagtggccccgccgtcaccagccttgagccaccagccaagctgaaggaattgcacttttccaatatgaagactgtagactgcgtggagcgcaagggcaagtatatgtacttcactgtggtgatggcggagggcaaagagatcgactttcggtgtccccaggaccagggctggaacgcagagatcacgttgcagatggtgcagtacaaaaatcgtcaggccatactggcggtcaagtctacgaggcagaagcagcagcacctggtccagcagcagcctccgcagacgcagcagatccaaccccagccccagcagccgcagatccaaccccagccccagccgcagatccagcctcaaccccaaccccaaccccaacctcagccccaaccccagcagcagccccagccccaacagctccactcctacccgcacccgcatcctcatctttaccctcaccctcaccctcacgcgcactcgcacccgcacccgcaccctcaccctcatccacaccaactccagcatgcgcaccagcctctccactcgcagccacagggccaccggcttctccgcagcacctccaactctgcctgaagagggcggcacccgggccactcaaggttttgaggacttcgggaagtgggaagagtgcattactatttaagttcacttggatcaaaaccaacggaggtctccccgccctgtgccagatcaagtagtttggacatcaccctacggataacg

SEQ ID NO: 100 - DNA, 1072 bp, Rattus norvegicus
  Genbank Accession No. NM_017187
ggcacgagggaaggaagtctctctgtggaggtctgagggaagagctcgcgccaggtagacgctgcgccgtcatcatgggcaagggggaccccaacaagccgcggggcaagatgtcctcgtacgccttcttcgtgcagacctgccgggaggagcacaagaagaagcatcccgactcgtcggtcaacttcgccgagttctcgaagaaatgttcggagagatggaagaccatgtctgccaaggaaaagtcgaagtttgaggatttggccaagagcgacaaagctcgttatgacagggagatgaagaactatgttcctcccaaaggtgataagaaaggaaagaaaaaagatccaaatgctcccaagagaccaccgtctgccttcttcctgttttgctctgaacatcgcccaaagatcaaaagtgaacaccccggcctgtctattggagatactgcaaagaaactgggggagatgtggtctgagcaatctgccaaagataaacaaccgtatgagcagaaagcagctaaactaaaggagaagtatgaaaaggatattgctgcataccgtgccaagggcaaaagtgaagtaggaaagaagggtcctggtaggccaacaggctcaaagaagaagaatgaaccagaagatgaggaagaggaggaggaggaagaagatgatgaagatgaagaggaggaagatgaggatgaagaataagtatctgtcctaaagtgtggagtatatgtgctcaggcaattattttgctaagaatgtgaaattcaagtgcagctcaacattagcttcagtataaaaactgtacagatttttgtatagctgatgagattctttgtagagaaaatactttttaaaaagggtttgtagctttttcaggggctacaacgtacagttagatttaaagcttttgatgttgaatgtttctaaatatttaatggtttctttaatttcttatgatagcaaaaaaaaaaacttcataggaatttctattaccagtaaaagaattttttttttaggatgttgcatttttgtttttttttaaaatttgtaataaaataatgtatatt

SEQ ID NO: 101 - DNA, 696 bp, Rattus norvegicus
  Genbank Accession No. NM_017202
gctcttccggtgcgggacccgctcttccggtcgcgagcacccggggtgtagagggcggtcgcggcggtcgcctgggcagcagtggcagaatgttggctaccagggcacttagcctaattggcaagagagccatttctacttcggtgtgccttcgggcacatgggagtgttgtgaagagtgaagactatgctctcccatcttatgttgatcggcgtgactaccccttgcctgatgtggcccacgtcaagctgctgtctgccagccagaaggccctgaaggagaaggagaaggccgactggagcagcctttccagggatgagaaagtccaattgtaccgcatccagtttaacgagagcttcgctgagatgaacaagggcaccaatgagtggaagacagtggtgggcctggccatgttcttcatcggcttcactgcgcttgtgctgatctgggagaagagctacgtgtatggccccatccctcatacctttgatcgtgactgggtggccatgcagaccaagcggatgctggacatgaaggtcaaccccattcagggcttctccgccaagtgggactacaacaagaatgaatggaagaagtgagagcctgctgctgtgggctcctccctccctccctccctcagcatgctggaagctgctgtgtccaatggtccatgttaataaatgaccagtttacgtg

SEQ ID NO: 102 - DNA, 1302 bp, Rattus norvegicus
  Genbank Accession No. NM_017209
tgtcagtgctggaagcggcatgttggtcagccggcgactgacaggggcgcgagcccgggcacctctgcttgcgagtctcctcgaggcttggtgccgccagggcaggaccacctcctcctactccgctttctcggagccgtcgcatgtgcgggcgctggtctatggcaaccacggggatccagccaaggtcatccaactgaagaacctggagctcactgctgtggaaggatctgacgtccatgtgaagatgctggcagcccctatcaatccatctgacataaatatgatccaagggaactatggcctccttcccaagctgcctgctgttggagggaatgaaggtgttggacaggtgatagcagtgggcagcagtgtgtctggattgaagccaggagattgggtgatcccagcaaatgctggtttgggaacctggcggactgaggcggtgttcagtgaggaagcgctgattggagtccctaaggacatccctctccagagtgctgccaccctaggtgtcaacccctgcacagcctacaggatgttggtggactttgaacagctacaaccaggggactctgtcatccagaatgcgtccaacagtggagtagggcaagcagtcattcagatcgcctcagcccttggcctaaagaccatcaacgtgatccgagacagacctgacatcaagaagctaactgacagactgaaggatctaggagctgattatgtcctcacagaggaggagctaaggatgcccgagaccaaaaacatcttcaaggacctgccgctgccccgactggctctcaactgtgtcggtgggaagagttccacagagctgctccggcacctagcgcccggaggaaccatggtgacctatggaggaatggccaagcagcctgtaacagcctctgtgagtatgctcatttttaaggacctcaaacttcgtggcttttggttgtcccagtggaagaagaaccatagtccagatgagttcaaggagctgattctcattctctgcaacctcatccgccaaggccagctcacagcccctgcctggtccgggattccactgcaggactaccagcaggctttggaagcctccatgaagccttttgtgtctttgaagcagattctcactatgtgattactccagaggaccaggaggaaagcaggagaggcaggccagcaagattggctggctgctggccctccatgaggactccagactgcctcaccctcactgcctcttcctaccaggagggtgggaggccaaccccagggtccctaataaaccctggacttccc

SEQ ID NO: 103 - DNA, 4404 bp, Rattus norvegicus
  Genbank Accession No. NM_017232
  misc_feature (1)..(4395): n = a or c or g or t
cttcaggagtacgaagaccctgcctacgaaggaactcagctctgtgttcctgccagctcccccgccagcttcacttgccaccaacgctgccacaactgctgccaccaccgctgccacctctgcgatgctcttccgagctgtgctgctctgcgcttgccctggcctcagccatgcagcaaatccttgctgttccaacccatgtcaaaaccgtggtgaatgtatgagcataggatttgaccaatataaatgtgactgtacccggactggattctacggtgaaaactgtactacgccgagattcctgacaagaatcaaattaccgctgaagcccaccccaaacacagtacactacatcctgacccacttcaagggagtctggaacattgtgaacaacattcccttccttcgaattcaatccatgagatacgtgttgacgtccagatcacatttgattgacagcccaccaacttacaatgtgcactacggttacaaaagttgggaagctttctccaacctctcctactacaccagggcccttcctcctgtggctgatgactgcccaactcccatgggtgtgaaaggaaataaggaacttcctgattcaaaagaagttctggaaaaggttcttctgaggagagagttcatcccggatccccaaggcacaaatatgatgttcgcattctttgcccagcacttcactcatcagtttttcaagacagatcagaagcgaggacctgggttcacccgaggactgggccatggagtggacttaaatcatgtttacggtgaaactctagacagacaacataaacttcgacttttccaggatggaaaattgaaatatcaggtcatcggtggagaggtgtatcctcccacagtcaaagacactcaggtagacatgatctaccctccccacgtccctgagcacctgcggttcgctgtggggcaggaagtctttggtctggtgccgggtctgatgatgtatgctaccatctggcttcgggagcacaacagagtgtgtgatattctcaaacaggagcatcctgagtgggatgacgagcgactgttccaaaccagcaggctcatactgataggagagacgatcaagatagtgatcgaagactacgtgcaacacctgaggggttaccacttccaactcaagttcgacccagacctgcttttcaaccagcagttccagtatcagaaccgcattgcctctgaattcaagacactctatcactggcatccgctgctgccggacaccttcaacattgaagaccaggagtacactttcaaacagtttctctacaacaactccatcctccttgaacacggacttgctcactttgttgagtcattcaccagacagattgctggccgggttgctgggggaaggaatgttccaatcgctgtacaagcagtggcaaaggcctccattgaccagagcagagagatgaaataccagtctctcaatgagtaccgcaaacgcttctccctgaaaccttacacatcgtttgaagaacttacaggagagaaagaaatggctgcagagttgaaagccctctaccatgacatcgatgccatggaactgtatcccgccctgctggtggaaaagcctcgnccagatgctatctttggggagaccatggtagaacttggagctccattctccttgaaaggccttatgggtaatcccatctgttctcctcaatactggaaacctagcaccttcggaggagaagtggggtttaggatcatcaacactgcctcaattcagtctctcatctgcaataatgtgaaagggtgtcccttcgcctctttcaatgtgcaagacccgcaggctaccaagacagccaccatcaacgcaagtgcctcccactccagactagatgacattaaccctacagtactaatcaaaaggcgttcaactgagctgtaagagtctactgaccatatttatttatttatatgaacaatttaatttaattatttaatattatacagaatgcttttttttcacttaacatcttctataacagaaggcaatattcttgaacaatgttccatttgtgaagattcctgtgttgtacttttaaatatggttatccgaaagtgaaagggaaaaaaaagaacactttcatttttcggcataagccagtgagaagggaaatgaattttgatatctttatacttgaatgtcagctcatgactagccttaattaagaacaaatgaaaggtgtatgaatatttaaatgctgttacaaggagggaaatgtgaatatttaaatgctgttacaaggagggaaatgctgcattgttggttatgactgtgtcatccttactatgttaggagcaaccgatgtggaattgtttttaaatcttgcatatctttatctcatcaaagcaaaggggtacaagtccagttttaaatgaacatgaaggcagataccggcaactgtctttttattttttaaaagcaatctttgaaacaaatgatttgcaatgtctaaatcgggagttggaatcactttcgaaagcccttactttcttgagctgtcaaatttgtacccacacagattaagcagctaccataaacacaaatctaaaactggggaaaactattatgactgatggttaagataccatgtcagggatctttcttttctcaggagtagtgaaaagctactatgacaatcagaccttccttgtacgtcagattgctggcgtaggaaggtggcggagcccgtgatgttctgtcctaaacgatggaaaagctttaaagcttgtgtgtgagtggtagccagcaaaacctatcatagcaacaaaagagtccacaaacaaaataaccaagaacaaagaagggttcccaagcttaaagaccgcatcgagggttaaactttttggaagggagacttttcagatcctcctgtgggtgcttggcttgtgactttggcaggctggattttaaagagtttttctgttgcacagtatgacacaacagcccatctctcaatgcaaaaggtatcagtgggcttcttcaaaactttgaaatgtcttccagctcacggtaccagaagtgcagtaggccccatgcaatgtgtgagttcagcctggatgccagcatgatgctctccttactctgtttcttgtagtcattttgctctgagaaactgctgattgatctgtttttgtagctgtgttccaggctcttagtattctttctttaacctccattaatattttctctacttgaagttttacattcaggaaaaacctcagctcaggactactgtgtagctccccttcggaggaagaagttactttagacaaaagggaaaaaaaattaaatgtatttttcatttgtaattaaatggaagggccctaccaagattctagaattggagggggttctgacaagaaagttacattcttgtcctgaagaattgctttcttatttaaaaacagagtcagttagtgggtagttctgggcaatagaaataaatataaaacaataatgacaatcattctctacatctcattatcagctgaggtactgtatattactgaatttactgaagatagttatgtctttcagacattgttgttataaactatgtttaagcctactacaagtgtttcttttttgcattatgtcagaattgatgtaccttttttttaatgattacctccctgtactactgtgcgaacaatcaaacaaaatgatgagattaatggtcatggataaatttcaagaaaactagtgtatttgattgaaaagtttaaagttagaacttaggccattggaatttactcatatagcaaactgcgtagagccaatattgactcacctacacacgttatacagattgacattttagacatttggaaggccccgtaggtattttattagttagaacttaattttttgaaaaaacatatccaaagcacaataggcattagaatttgtgcatcgagaactgattacaaataatattgatatgtatgtaaataactgagaagtatgtcttatgaagaaatatattttattacaaaaaattataaaacattttcaagattatatgctttaaaagtttaagatcagaaaataatcaactttagaaaaacacgtttaaaaattgttaacatcattgattaaaaaaaaaaaaaaaaaagccaacatgattgttgtgaacatcaacctgctgactgaacctgggaattcaggttaagtatgtgactgctgccgtgcctcagagaaatttgtatttaaattaacttatgtaaaaaaaaatcttagaacaaatgtttgtttatttttatacttatttaagaaattgaaaacttctgaaaataaagtttgattgtgtctttaaaaaaaaaaaaaaaaaaaaaaaaaaaaaaaaa

SEQ ID NO: 104 - DNA, 5925 bp, Rattus norvegicus
  Genbank Accession No. NM_017240
ccgctcagtcatggcggatcgagagatggctgcatttggggccggagcccccttcctgcgaaaatctgagaaggagcggctggaggcgcagaccaggccctttgacctcaagaaagatgtttttgtgcctgatgacaaagaagagtttgtcaaggccaagatcgtgtctcgagagggtggcaaagtcaccgctgagacagagaatggcaagacggtgactgtgaaggaggaccaggtgatgcagcagaaccctcccaagttcgacaagatcgaggacatggccatgctgaccttcctgcacgagccggctgtgctctacaatctcaaggagaggtacgcttcctggatgatctacacctactcaggcctcttctgtgtcaccgtcaacccctataagtggctgccagtgtacaatgcgcaagtggtagctgcctaccggggcaagaagaggagcgaggctccaccccacatcttctccatctctgacaacgcctatcagtacatgctgacagatcgggagaaccagtccatcctcatcaccggagaatccggagctggtaagaccgtcaacaccaagagggtcatccaatattttgctgttattgctgccattggggaccgcagcaagaaggaccagaccccaggcaagggcaccttggaagatcaaatcatccaagccaaccccgctctggaggcctttggcaatgccaagacagttcggaatgataactcctcccgatttgggaaattcattcgaatccattttggggcaacaggaaagttggcatctgcagatatagagacctaccttctggaaaaatccagagttattttccagctgaaagcagaaagagattatcacattttctaccaaatcctgtctaataaaaagcctgagcttctagacatgctgctgatcaccaacaacccctacgattatgcgttcttctcccagggagagacgactgtggcctcaatagatgactctgaagagcacatggccaccgatagcgcctttgatgtgctgggcttcactccagaagagaagaactccatttacaagctgacaggcgccatcatgcactttggaaacatgaagttcaaacagaagcagagggaggagcaggcagagccagacggcacggaagaagctgacaagtcagcctacctcatgggactgaactcggctgacctgctcaaggggttgtgccaccctcgagtcaaagtgggcaacgagtatgtcaccaaagggcagaatgtccagcaggtggcatatgccatcggggcactggccaagtcagtgtacgagaagatgttcaactggatggtgacacgcatcaacgcaaccctggagaccaagcagccacgccagtacttcataggtgtcctggacatcgccggctttgagatctttgatttcaacagctttgagcagctgtgcatcaacttcaccaatgagaagctgcagcagttcttcaaccaccacatgttcgtgctggagcaggaggagtacaagaaggaaggcatcgagtggacgtttattgacttcggcatggacctgcaggcctgcatcgacctcatcgagaagcccatgggcatcatgtccatcctggaggaggagtgcatgttccccaaggccacggacatgaccttcaaggccaagctgtacgacaaccacctgggcaagtccaacaacttccagaagcctcgcaatatcaagggaaagcaggaagcccacttctctctgatccactatgctggcaccgtggactacaatatcctgggctggctacagaagaacaaggaccctctcaatgagacggtggtggggctgtaccagaagtcctccctcaagctcctaagtaatctgtttgccaactatgctggagctgatgcacctgtagacaagggcaaaggcaaagcaaagaaaggctcatcctttcagaccgtgtccgcactgcacagggaaaatctgaacaaacttatgacaaacctgcgctccacgcaccctcactttgtacgctgcatcatccccaatgagacgaagtctccaggggtgatggacaaccccctggtcatgcaccagctgcgatgcaacggagtgctggagggtatccgcatctgtaggaagggcttccccaaccgcattctttatggggacttccggcagaggtatcgaatcctgaacccagcagccatccctgagggccaattcattgatagccggaaaggggctgagaagctgctgggctccctggacattgaccacaaccagtacaagtttggccacaccaaggtgttcttcaaggcggggctgctggggctgctggaggagatgcgagatgagaggctgagccgcatcatcaccagaatccaggcccagtcccgaggtgtactttccagaatggagtttaagaagctgctggagcgcagagactccctgctgattatccagtggaacatccgcgccttcatgggggtcaagaattggccgtggatgaagctctacttcaagatcaagccgctgctgaagagcgcagagacagagaaggagatggccaacatgaaggaggagttcgggcgagtcaaagatgcactagagaagtctgaggctcgccgcaaggagctggaggagaagatggtgtccctgctgcaggagaagaatgacctgcagctccaagtgcaggcggaacaagacaacctggcagatgccgaggagcgctgcgaccagctgatcaagaacaagatccagctggaggccaaggtgaaggagatgaccgagaggctggaggacgaggaggagatgaacgccgagctcacggccaagaagcgcaaactggaagacgagtgctcagagctcaagagagatatcgatgacctggagctgaccctggccaaggtggagaaggaaaagcacgcaacagagaacaaggtgaaaaacctgacagaggagatggctgggctggacgagatcattgtcaagctgaccaaggagaagaaagctctacaagaggcccaccagcaagccctagatgaccttcaggctgaggaggacaaggtcaacactctgaccaaggccaaggtcaagctggagcagcaagtggatgatctggagggatccctggatcaggacaagaaggtgcgcatggacctggagcgagcaaagcggaagctggagggtgacctgaagctgacccaggagagcatcatggacctggagaacgacaagcagcagttggatgagcgactcaaaaagaaggactttgagttaaatgcactcaacgccaggattgaggatgagcaggccctgggcagccagctgcagaagaagctcaaagagcttcaggcacgcatcgaggagctggaggaggagctggaggctgagcgcacagcccgggccaaggtggagaagctgcgctcagacctgtcccgggagctggaggagatcagtgagaggctagaggaagccggtggggccacatctgtgcagatagagatgaacaagaagcgcgaggccgagttccagaagatgcggcgggacctagaggaggccacgctgcagcatgaggccacagctgcggccctgcgcaagaaacacgcggacagcgtggccgagctgggcgagcagatagacaatctacagcgggtgaagcagaagctggagaaagagaagagcgagttcaagctggagctggatgacgttacctccaacatggagcagatcatcaaggccaaggctaacctggagaagatgtgccggaccctggaggaccagatgaatgaacaccggagcaaggctgaggagacacagcgttctgtcaatgacctcacccgccagcgggccaagctgcagacagagaatggggagctgtccagacagctggatgagaaggaggctcttatctctcagctgacccgaggcaagctcacgtatacccagcagctggaggacctcaagaggcagctggaggaggaggtcaaggccaagaatgccctggcccacgcactgcagtcagcccggcatgattgcgacctgctgcgggaacagtacgaggaggaaacagaagccaaggctgagctgcagcgtgtcctgtccaaggccaactcagaggtggcccagtggaggaccaagtatgagacggacgccatacagaggacggaggagctggaggaagccaagaagaagctggctcagaggcttcaggatgctgaggaggcagtggaggccgtcaacgccaagtgctcctcgctggagaagaccaagcacaggctgcagaacgagatcgaggacctgatggtggatgtggagcgctccaatgcggccgccgcagccctggacaagaagcagaggaacttcgacaagatcctggttgagtggaagcagaagtatgaggagtcccagtcagagctggagtcttcccagaaggaggcgcgctccctgagcacagagctcttcaagctgaagaatgcctatgaggagtctctggagcacctggagaccttcaagcgggagaacaagaacctccaggaggagatctcagacctgactgaacagctgggctcaactgggaagagcatccacgagctggagaagatccgaaagcaactggaggctgagaagctggagctgcagtcagccctggaagaggctgaggcctccctggagcatgaggagggcaagatcctccgagcccagctggagttcaaccagatcaaggcagagatcgaaaggaagctggcagagaaggacgaggagatggagcaggccaagcgcaaccacctgcgggtggtggactccctgcagacctccctggatgccgagacgcgcagccgcaacgaggccctgcgggtgaagaagaagatggagggcgacctcaacgagatggagatccagctcagtcatgccaaccgcatggctgctgaggcccagaaacaagtgaagagcctccagagtttgctgaaggacactcaaatccagctggatgacgcagtccgtgccaatgacgacctgaaggagaacatcgccatcgtggagcggcgcaacaacctgctgcaggcggagctggaggagctgcgggccgtggtggagcagacggagcggtctcggaagctggcagagcaggagctgatcgagaccagcgagcgggtgcagctgctgcactcccagaacaccagcctcatcaaccagaagaagaagatggatgcagacctctcccagctccagacagaggtggaggaggcggtgcaggagtgtaggaacgcagaggagaaggccaagaaggccatcacagatgccgccatgatggccgaggagctgaagaaggagcaggacaccagcgcccacctggagcgcatgaagaataacatggagcagaccatcaaggacctgcagcaccggctggacgaggcagagcagatcgccctcaagggtggcaagaagcagctgcagaagctggaggcccgggtccgggagctggagaatgagctggaggctgagcagaagcgcaatgcggagtcggtgaagggcatgaggaagagcgagcggcgcatcaaggagctcacctaccagacagaggaagacaggaagaacctactgcgactgcaggacctggtggacaagctgcagttaaaggtgaaggcctacaagcgccaggctgaggaggcggaggaacaggccaacaccaacctgtccaagttccgcaaggtgcagcacgagctggatgaggcagaggagagggcggacattgccgagtcccaggtcaacaagctgcgggccaagagccgtgacattggcgccaagggcctgaatgaagagtagatcttgtgctacccaaccctaaggatgcctgtgaagccctgagacctggagcctttgaaacagcaccttaggcagaaacacaataaagcaattttccttcaagccaa

SEQ ID NO: 105 - DNA, 2626 bp, Rattus norvegicus
  Genbank Accession No. NM_017245
cgcttccctgttcacctctgtatttgagaatccgacgccatctgccaccatggtgaacttcacagtagatcagatccgtgccatcatggacaagaaagccaacatccggaacatgtcagtcatcgctcacgtggaccacggcaagtccacgttgaccgactcccttgtgtgcaaggctggcatcatcgcctctgcccgagccggtgagacacgcttcactgacactcgaaaggatgagcaggagcgctgcatcaccatcaagtccactgccatctccctcttctatgagctctccgagaacgacctgaacttcatcaagcagagcaaggatggctctggcttcctcatcaacctcattgactctccaggtcatgtggacttctcctcagaggtgaccgctgctctgcgtgtcactgatggagcactggtggtggtggactgtgtgtctggtgtctgtgtgcagacagagacagtgctgcggcaggccatcgctgagcgcatcaagcccgtgctgatgatgaacaagatggaccgggccctgctggaactgcaactggagcctgaggagctctaccagaccttccagcgcatcgtggagaacgtcaatgtcatcatctccacctatggcgagggcgagagtggacccatgggcaatatcatgatcgatcctgtcctgggcactgtaggctttggctctggcctgcatgggtgggccttcacactgaagcagtttgcagagatgtatgtggccaagtttgcagccaagggtgagggccagctgggtgcagctgagcgggccaagaaggtagaagacatgatgaagaagctgtggggagaccggtattttgacccggccaacggcaagttcagcaagtcagccaatagcccagacgggaagaaacttccccgcaccttctgccagctcatcttggaccccatcttcaaggtgtttgatgccatcatgaacttcagaaaggaggagacagccaagctgatcgagaagctggacatcaagctggacagtgaggacaaggacaaggagggcaaaccactgctgaaggctgtgatgcgtcgctggctccctgctggtgacgccctgctacagatgatcaccatccacttgccgtccccggtcactgcacagaagtaccgttgtgagctgctgtacgagggcccacctgatgacgaggccgccatgggtattaagagctgcgaccccaaaggccccctaatgatgtacatctccaagatggtgccaacatctgacaaaggccgcttctatgccttcggtagagtgttctctggggtggtgtccacaggtctgaaggtccggatcatgggccccaactatacacctgggaagaaggaggacctgtacctgaagcctatccagaggaccattctgatgatgggccgctatgtggaacccattgaggatgtgccctgtggcaacattgtggggttggtcggggtggaccagttccttgtgaagaccggcaccatcactacctttgagcacgctcacaacatgcgggtgatgaagttcagcgtcagccctgtagtcagggtggcagtggaggccaagaacccagctgacctgcccaagctggtggaggggctgaagcggctggctaagtctgaccctatggtgcagtgcatcatcgaggagtctggggagcacatcattgctggtgctggagagctgcacctggagatctgccttaaggacctggaggaggaccatgcctgcatccccatcaagaaatctgaccctgtcgtgtcctaccgggagacagtcagtgaggagtccaacgtgctctgtctttccaagtccccaaacaagcacaacaggctgtacatgaaggccaggcccttccctgatggcctagcagaggacatcgataagggtgaggtatctgcccgccaggagctcaaggcgcgtgcccgttacctggccgaaaagtatgagtgggatgttgctgaagcccgcaagatctggtgctttggacctgatggcactggtcccaacattctcaccgacatcaccaagggtgtgcagtacctgaatgagatcaaggacagtgtggtggctggattccagtgggccactaaggagggtgctctttgtgaggagaacatgcgtggtgtgcgatttgatgtccatgatgtgaccctgcatgctgatgccatccaccgaggaggtggtcagatcatccccacagcgcgccgctgcctctatgccagtgtgctgactgcacagccccgcctcatggagcctatctacctggtggagattcagtgtcctgagcaagtggtgggcggaatctatggtgtcctcaacaggaagcgtggccatgtctttgaggagtcccaggtagctgggacccccatgttcgtggtcaaggcctacctgcctgtcaatgaatcctttggcttcactgccgaccttcgatccaacactggtggccaggccttcccccagtgtgtgtttgaccactggcagatcctgcctggggacccctttgacaacagcagccgccccagccaagttgtagctgagacccgcaagcgcaaaggcctgaaggagggcatcccagcgctggacaacttcctggacaaactgtag

SEQ ID NO: 106 - DNA, 2519 bp, Rattus norvegicus
  Genbank Accession No. NM_017259
agagcccgtgaggcggccggaccatcatcgtcctgctaatacagctacttcctcaaccaccggtatgagccacgggaagagaaccgacatgctcccggagatcgccgccgccgtaggtttcctcaccagtctcctgaggactcggggctgcgtgagcgagcagagactcaaggttttcagtagggcgctccaggacgcactgaccgatcattacaaacaccactggtttccagaaaagccatccaagggctccggctatcgctgtatccgcatcaaccacaagatggaccccatcatcagcaaggtggccagccagatcggactcagccagccccagctgcaccagctcctgcccagcgagctgaccctgtgggtcgatccctacgaagtgtcctaccgcatcggggaagatggatccatctgcgtgctgtatgaggaggcgccggtggccacctcctacgggctcctcacctgcaagaaccagatgatgctgggcaggagcagtccatcgaagaactacgtgatgactgtctccagctagagaggagccgccccgccctggcactctactgttctcatgctgccctgacaacaggccaccgtatacctcaacctggggaactgtatttttaaagtgaagagctatttatacatgttatttttttttttaagaaaagaggaggaaaaaaaccaaaagtttttttttaaaaaaacaaaaaagaaaaaacaattcgttaacgggagctgcttggaagtggtctccccaggtgcctttggagagaactgttcttgattgagtctatgagccagtgtttgcctaggggagtgggttggggattggcctagccaaggtaaaaggggattcttggctgatcccccaggaggtggtggaagggagcaaggttagcaactgtgaacgagaggggtcagggtctgctctgggttaccgttcccgctgggatgcctgtattcctggtccctctcttactcaggggcattcaagcctggtctcaaataatactacattgcctaatcttctcttttgtttttctgctgagatcctgggcacacggaaaggcctctcctgtcccttccgtctgagcagagtttcttgaaactgtgtctcgtttctgatcctaccctcggggtcctgaagaggtggtttcccggcctagaatctatctaaacgtttttggagggtgggctataaggcagatataatggaggggaaccgcacaaaccctttgctttgctctgtgctgctttgtatggatggatggttaataacttagggatgatttgcaatggaattttgggacccaaagagtatccaatgggggtgggtgttttggacctaagccctccttttgggaaccacgtgacagtctgaatgctgctaccattattcctttgagaggtggctcaaagctccagggaactccaggtcctttcttactgccttctcttcaagagcaacctcccccatttcttttccctctttcctgcggttgggtcctggagggccccatttcctaggacaagagttctcaatcactgtgcaatagtcccaggaagctctggaactgggcctcccagcccctcctgattcctggtgggttttaggaccccgccttccccgttcttctgactggctggtgggccttgaggagatctccctcggccgcagggagggcacctgtgcactgcaggactacctggtactcctgtggggctgccacggagagccaaaccttaggcatagctttgtctcctcggtgctcagagcacctgcagggggaggttgcccccctcagtaaaaatccaaatttatttgtagatgtgtgcaatatttactgttctgggttggagaaaatcgggaaacactgggaagaagtggccttccttcaggttcagtgacactgatgagggcttctcagaaggcctcgagtctctcaaaccaaaggacagagctagagccagccagtcacccttagtgaggatccccttccccatgtctctccactgccgtggcatcccatgtcctggatttctcaattcctcagtttctactcaaaggtgctacttaccaaacactctgcccgtcccgctctccccagcttcgcacagccgtcccaggtggcttcgtctctcctgctttaaagttaactttgggcccacagacccgagagctgtgggttgaagcaaagctgtgaatcgctccagatggtccctgtgttctgtccacacacaggtccccgcctttttagaagcagcctcctggtctcatgcttaaatctgttcctcactgcccgtgttcactttagaaatggcagaaccacagagctggactgttgagcaggcctgtctctctcattaaatagaaataagtaagtttgtaagctattccgacagaagagacaaaggttactgattgtacaatagcgcttttatatggaagactgtacagctttatggacaaatgtaaaacttttttgtttttaataaaaatgtagcagacc

SEQ ID NO: 107 - DNA, 970 bp, Rattus norvegicus
  Genbank Accession No. NM_017282
gcggtgtggttgagtagggtgctgctttcagtcgtgtggcctttggaactccgcgtagcactgccgcctcctcctgtcctcgccatgttcctcactcggtccgagtacgacaggggtgtgaacactttttctcctgaaggaagattatttcaagtggaatatgccattgagggccataagcttggttctacggccattggcatccagacatcagagggtgtatgtctagctgtggagaagagaattacctcgccactaatggagcctagcagcattgagaaaatcgtagagattgatgctcatataggttgtgccatgagtgggctaattgctgatgctaaaactttaattgataaagccagagtggagacacagaaccactggttcacctataatgagacaatgacagttgagagtgttacccaggctgtgtccaatctggctttgcagttcggagaagaagatgcagatccaggtgctatgtctcgtccctttggagtagcattgttgtttggaggagttgatgagaaagggccccaactgtttcacatggacccatctgggaccttcgtacagtgtgatgctcgagcaattggttctgcgtcagagggtgcccagagctccttgcaggaagtttaccacaagtctacgactctgaaggaggccatcaagtcttcactcatcatcctcaagcaagtcatggaggagaagctgaacgcaactaacatcgagctggccacagtgcagcctggtcagaatttccacatgttcacaaaggaagaactggaggaggtgatcaaggacatttaaggaggggccatcctcgaacttctgtgggacagtttcagttctaatggctcttagactttatttccaactccacgtcgtgaaaatatccagtatatgtatgtgtgtttttttatgatgtctgtacataacagcaattctgaaataaaaaaaatttacaaat

SEQ ID NO: 108 - DNA, 3156 bp, Rattus norvegicus
  Genbank Accession No. NM_017297
gtttacacgcctctgctagctggacctgcgacaccagagtggctcagggcggctgtcggtacgtaggcaatgcctgaggctatggaatcccctggagagccctgagagccacacgcaccgccttgaagggatcgccagaagttagccccaagggttcagagaagctctctgctctacgactatggccggtgattctaggaatgctatgaatcaagacatggagataggagtcacctcccaggaccacaagaagatccccaaacaggctcgggattacatccccattgccacagaccgcactcgcctgctgccggaaggcaagaagccacgccagcgctacatggagaagaccggcaagtgtaacgtgcaccatggcaatgttcaggaaacctaccgctacctaagtgacctcttcaccaccctggtggacctcaaatggcgcttcaaccttctggtcttcaccatggtctacaccattacttggctattctttggcttcatctggtggctcattgcttatgtccgaggtgatctggaccacgtgggtgaccaagagtggatcccttgtgttgaaaaccttagtggctttgtgtctgctttcctgttctccattgagacagaaacaaccattgggtatggcttcagagtcattacagagaagtgtccagaggggatcattctccttctagtgcaggccatcctgggctctattgttaatgccttcatggtgggttgcatgtttgtaaagatcagccagccaaagaagagagcagagaccctcatgttctccaacaatgctgtcatctccatgcgggatgagaagctgtgcctcatgttccgggttggggacctccgaaactcccatatcgtggaggcctccatccgcgccaagcttatcaagtcccggcagaccaaagaaggggaattcatccccttgaaccagaccgacattaacgtgggctttgacactggtgacgaccgcctcttcctggtgtcccccctcatcatctcccatgagatcaatgagaagagccctttctgggagatgtctcgtgctcaactggagcaggaagagtttgaggttgtggtcatactagaagggatggtagaagccacaggcatgacttgccaagcacggagctcttacatggatacagaggtgctctggggtcaccgattcacaccagtcctcaccttggaaaagggcttctatgaggtggactacaacactttccacgacacctatgagaccaacacacccagctgctgtgccaaggagctggcagaaatgaagaggaatggtcagctcctccagtccttgcccagtcctcctttgcttgggggctgcgctgaggctgagaaagaagcagaggctgagcacgatgaggaggaggaacccaatggactgagtgtgtcccgggcaacaaggggctcaatgtgaagcctgtgtgctacccagagcctcttcctgtcagacaccaaggagcctgagaggccagagaggcaattagttgagcaagctttgtggagtcccaggagtatgggacttctacaaagaggaacagtgtggtgaggcctcgcatctcctcctcagggcctcggagcaagtggcgttgactaggcctcccaagaagtgttttctcggcctctgtgaaggagagcattaggggtcaccagggtgggcttcccaaggaggagttcttaggtgtcatccatcctctctctgactgctgaagcctgctcactggcctccctgattctctgtttcctcagcacaatcactgaggcctgtgaatggagggactaattccatccatggatactcaggcctccaactggggatgagttcacagaggccttccaggggcaatgccctgcagtctgaggccaaaacccactgatttaatagcttcttagcaaggccccttaacctctgatactacctactgtgtgttttcctcttctgtgtcctcttccatgacactacggcttacagggtaattgatttaattagagtggccctaggacactgagtacctaggagcacacacaatgtcgtcctcacaactgcctggcactcctactcacacttcaaaggacagacacagcagttgtggcttttgtaggagtgtgtggcaaaagaacttcaaagaaccgacctctaaagcggtcccggggaacatgtgaatttcagagagccagattagctcattggtactaacatagggatggcagacaggaaagagacacaaggataattttaaaataagtatctggagcctggtgttgtgatgcatgcctgtaatcctagcatttggcaggctgaggcagaattgagaatttgaagccagccgggctatatagccctgtctgaaaaaagcaagagacaaactacaaccaaggaaacatctgccacagttgttgcatggggctcctcggagaaaagtaggctatgaaacacaagtgacaagaggccataaaggcatcttcactgccaagccaagtgtggaccagagtcttggctgccgctgagatgcctctgggcctcctccctatggaacagctccaacaggtggtgggacctagagggaggtccctgagaacaggatgagaggttggtgggtgactagggaaagaagagtctaagtgtggagcagagccttggggtccacagcctcagagacctttctcttccagtctaggagatctgatggtcggtcagtgaagcattatgttgaaaacaaagttggcctggtcttgggaatatgctagcatgatccccaacacctctacccgggtgttcatggctctcaaccagcctctgagaatagaagcaccttcctgccaggccctagagaactttctctggcatctccaaggagatgagacgctaaggctagggaacagcatcctaacctcaggccttgttccccttacagggtgcccaggtctctaggctggtgagaaggtgtcctaggatggctagctacattgtggaccagacacagatagaacaggggaaccttgacttgttatctgggctgaatcttgaaagacagtctaaagccagtggttctcaaccttcctaatgctgtgaccttttaatatagttcctcatgttgtgatgaccccaatcataaaattatttttgttcct

SEQ ID NO: 109 - DNA, 1330 bp, Rattus norvegicus
  Genbank Accession No. NM_017320
gggactctctcatgccgccatacggagatggctgttttgggtgcccctggtgtgctctgtgacaatggagcaactgcagagagacctaccctggaccaccactgggatctctggaagaaaactcgcatgagaaggaatacagatcagaatgaagaagacgtacgacgtctcatctgggaaaagaatctcaagtttataatgcttcacaatctggaacattctatgggaatgcattcatacagtgtgggcatgaaccacatgggagacatgacacctgaagaagtcataggttatatgggctctctgagaattcccaggccctggaatagaagtggcactctcaagtcaagctctaatcagacattgcccgactctgtggactggcgagaaaagggctgcgtcactaatgtgaaataccagggctcttgtggttcctgctgggctttcagcgccgagggggcccttgaagggcagctgaagctgaaaacggggaagctggtgtctctcagtgctcagaacctggtggattgctcaaccgaagaaaagtacgggaataaaggctgcgggggtggcttcatgaccgaagctttccagtacatcatcgatacgagcatcgactcagaagcttcctatccctacaaagccatggatgaaaagtgtctctatgacccaaaaaatcgagctgccacgtgttcaaggtacattgagctccccttcggcgatgaagaagctctgaaagaagcagtggccactaaagggcctgtctctgtgggcatcgacgacgccagccattcctccttcttcctctaccaaagtggtgtctatgatgacccctcctgtaccgagaatatgaatcatggtgttctcgtggttggctatgggactcttgatgggaaagactactggcttgtgaaaaacagttggggccttcactttggtgatcaaggatatattcggatggcgagaaataacaaaaatcactgcgggattgctagctattgctcttacccagaaatctaaaccgtttcttctttttctaatgggtcacaaagacggaatacactctaatttaattttgtctgctccatccggaggacccaagtgtgtcgtgatcagtgtgtacatactgtgctaactggcttacagcttgtttgttttataactttacctctctctgaaaagtctgtaagcaaggacgcgctgaggatggagctggcagtctgtcctagatattctttctatgcttgcaccctgtcgtctaatgtgtctaataaccctttgtaacacagatatccccaaagtgcctaataaaatctgtcatttcaagctc

SEQ ID NO: 110 - DNA, 436 bp, Rattus norvegicus
  Genbank Accession No. NM_017334
actttattttggactgtggtacggccaacaagaccactctgtatgcaaaagcccaacatggctgtaactggagatgaaactgatgaggagactgaccttgccccaagtcacatggctgctgccacaggtgacatgccaacttaccagatccgagctcctactactgctttgccacaaggtgtggtgatggctgcctcaccaggaagcctgcacagtccccagcaactagcagaagaagcaactcgcaagcgggagctgaggctgatgaaaaacagggaagctgctaaagaatgtcgacgtcgaaagaaagagtatgtcaagtgtcttgagagtcgagtcgcagtgctggaagttcagaacaagaagcttatagaggagcttgaaactttgaaagacatttgctctcccaaaacagattagtagaaatatttaacta

SEQ ID NO: 111 - DNA, 1139 bp, Rattus norvegicus
  Genbank Accession No. NM_017343
agatttgaaccgccaccatgtcgagcaaaaaagcaaagaccaagaccaccaaaaagcgccctcagcgcgcaacgtccaacgtgttcgccatgtttgaccagtcccagatccaggagttcaaagaggccttcaacatgatcgaccagaaccgggacggcttcattgacaaggaggacctacacgacatgctcgcgtctctggggaagaaccccaccgacgcctacctggacgccatgatgaacgaggccccgggccgcatcaatttcaccatgttcctcaccatgtttggagagaagctgaacggcaccgacccagaggacgtcatcagaaacgccttcgcttgcttcgatgaggaagccacaggcaccatccaggaggattacctgagggagctgctgaccaccatgggtgaccgcttcacagatgaggaagtggatgagctgtacagggaggcccccatcgacaaaaagggcaatttcaactacatcgagttcacgcgcatcctcaagcacggagcgaaagacaaagatgactgaagaggctgcagctgacattcctgttgagtttccttattcacttcatgtctcagacacagcccccataggacctactgtgtgccactttgtgtccctcagacaccccctcccataggcctactgtgtgccgcttagtccctcagacaccccctcccataggcctactgtgtgccacttagtccctcagacaccccctcccataggcctactgtgtgccatttgtccctcagacaccccctcccataggacctactgtgtaccacttggtttctcagacagccccacccccaaacccccctaaggacctactgcgggccacttagtttcacagcctttcctttttttaatgtatttattccagaccctttctgccacttagcatgtgtataatcagactggaatggggacaatgttgtaattgtactgaaaatgagatgcaaataaaaaaatcaaccaatgtgaaagcccaggaaaatatatcggcatttctggttttgctggatttttttacatttttatataataaaaatgttattttgaaataaagattatgctgactcaaggtggagtataaaacaaaaaaaaaaaaaaaaaaaaaaaaaa

SEQ ID NO: 112 - DNA, 1004 bp, Rattus norvegicus
  Genbank Accession No. NM_019131
cttagccgcagggggcgccggcgttgcaaagcgggcctgggcgggacgaaccggacctggctccgtaactgcaggagcccagcagtagcagctgcagagcgcggaggcagagcacagcctcagccgccgcctcgccatggcgggtagcagctcgctggaggcggtgcggagaaagatccggagcctgcaggaacaggcagatgccgcggaggagcgtgcgggcagcctgcagcgagagctggaccaggagcggaagctgcgggaaaccgctgaagctgacgtagcatctctgaacagacgcatccagctggttgaggaggagttggatcgcgctcaggagcgtctggccacagctctacagaagctggaggaggctgagaaggctgcagatgagagtgagagaggcatgaaagtcattgaaagccgagcccaaaaagatgaagaaaagatggagattcaggagatccagctgaaagaggccaagcacattgctgaagatgctgaccgaaagtatgaagaggtggcccgtaagctggtcatcatcgagagcgatctggagcgtgcggaggagagggctgagctctcggaaggcaaatgtgccgagcttgaagaagagttgaaaacggtgacgaacaacttgaagtcactggaggctcaggctgagaagtactctcagaaagaagacaagtatgaagaggagatcaaggttctctctgacaagctgaaggaggctgagacccgggctgagtttgcagagagatcagtaaccaaattggagaaaagcattgatgacttagaagataagtttctttgcttctctcctcccaagactccttcatcaagccggatgtcccacctctctgagctctgcatctgtctgctctccagctgacccaggtttctttctagtgcccacccaccctagggccaggcacagaccgtgctttctattgtacagaggtgatcctcccagtgtaaaataaacactgtacgctagtcctgtt

SEQ ID NO: 113 - DNA, 8329 bp, Rattus norvegicus
  Genbank Accession No. NM_019143
ctcgcacccgctgcactgcacaggggaagaaaaggagcccagggtgtgagccggccagcggccacaacttctggtcctctcccgtgtcctccttccatcttcttacaggcgtccccacctcaggacttttcctgcaggctgcgaggggaaccaacttcgtggccactagcctcctggagagggcgactctcctcccatccactcaagatgctcaggggtccgggacccgggcggctgctgctgctagcagtcctgtgcctggggacatcggtgcgctgcaccgaaaccgggaagagcaagaggcaggctcagcaaatcgtgcagcctccgtccccggtggctgtcagtcagagcaagcctggctgttttgacaacgggaagcattatcagataaatcagcagtgggaacggacctacctaggcaacgccctggtttgtacctgctatggaggaagcagaggttttaactgcgagagcaagcctgaacctgaagagacctgttttgacaaatacactggaaacacttacaaagtgggtgacacttatgagcgccctaaagattccatgatctgggactgtacctgcattggggctgggcgaggcaggatcagctgtaccattgcaaatcgctgccatgaagggggtcagtcctacaagattggtgacaagtggaggaggccacatgagactggtggctatatgttggagtgtttgtgtctggggaatggaaaaggggaatggacctgcaagccaatagctgagaaatgttttgatcacgctgctgggacttcctacgtcgtgggggagacctgggaaaagccctaccaaggctggatgatggtggactgtacttgtctgggcgaaggcaatgggcgtatcacctgcacctcccggaacagatgcaatgatcaggacaccaggacgtcctacagaattggagacacatggagcaagaaggacaacagagggaacctgctccagtgtgtctgcacaggcaacggcagaggggagtggaagtgtgagcgacatgttctacagagtgcttcagctggatctggctccttcacagatgtccgaacagctatttaccaaccccagacccacccccagcccgcaccgtacggccactgtgtcacagacagcggtgtggtctactctgtgggaatgcagtggctgaagtctcaaggagacaagcagatgctgtgcacttgcctgggcaatggcgtcagctgccaggagacagctgtgacccagacttacggtggcaactcaaacggggagccctgtgttctcccgtttcactacaacggtaggaccttctactcctgcaccaccgaagggcggcaagacggacatctgtggtgtagcacaacttcaaattatgaacaagaccagaagtattctttctgcacagaccacgcggttttggttcagactcgaggtgggaattccaatggtgccttgtgccacttccccttcctgtacagcaaccggaattacagcgactgtacttctgagggtaggcgggacaacatgaaatggtgcggcaccacccagaactacgatgccgatcagaagtttggattctgcccaatggctgcccatgaggagatctgcacgaccaacgaaggggtcatgtatcgcattggggaccagtgggataagcagcatgacctgggccacatgatgaggtgcacgtgtgttgggaacggccgtggacaatgggcctgcatcccctactcccagctccgagatcagtgcatcgttgatgacattacttacaacgtcaacgacacgttccacaagcgtcacgaggagggacatatgctgaactgtacctgcttcggtcagggccggggcagatggaaatgtgaccccatcgaccgatgccaagattcagagacccggacattttaccagattggtgactcctgggagaagtttgtgcatggtgtcagataccagtgttactgttacggccgtggcattggggagtggcactgccagcctctgcagacctacccaggcacaactggacctgttcaagtaattatcacggagacccccagccagcccaattcccaccccatccagtggaatgccccggagccttcacacatcaccaagtacattctcaggtggagacctaaaacctctacgggtcgctggaaggaagctaccattccaggccaccttaactcctataccatcaaaggcctgaccccaggtgtgatctacgagggacagctcatcagcatccagcagtacgggcaccaagaagtgactcgctttgacttcaccaccagcgccagcacacctgtgaccagcaacacagtgactggagagactgcgcccttttctcctgttgtggccacttccgaatctgtcactgaaatcacagccagcagcttcgtggtctcctgggtctcagcttccgacacggtgtcaggattccgagtggagtacgaactgagcgaggaaggagatgagcctcagtaccttgatcttccaagcacagccacttctgtgaacattcctgacctgctcccgggcagaaagtacatcgtcaacgtctatcagatatctgaagagggaaagcagagcttgatcctgtctacatcacagactacagcacctgatgcgcctccagaccctactgtggaccaggttgatgacacttccattgttgttcgatggagcagaccccaggcacctatcacagggtacaggattgtctattcaccttcagtagaaggcagtagcacagaactcaaccttcctgaaacggccaactccgtcaccctcagcgacctgcagcccggtgttcagtacaacatcactatctatgctgtggaggagaaccaggagagcacacccgttttcatccagcaggagactactggcgtcccacgatccgatgatgttcccgctccaaaggacctacagtttgtggaagtgaccgacgtgaaagtcaccatcatgtggacacctcctaatagcgcagtgactggataccgtgtggatgtcctgcctgtcaacctgccaggggaacatgggcagaggctgcctgtcaacaggaacacctttgctgaagtcaccggactgtccccaggggtcacgtacctcttcaaagtctttgctgtgcatcagggcagggaaagcaagcctctgacagcacaacagaccaccaaactcgatgctcccactaacctccagtttgtcaatgaaacggacagaacagttctggtaacttggactccacctcgagcccggatagcaggctaccgactgacagtgggcctcacccgaggaggccagcccaagcagtacaatgtgggacccatggcttccaagtatcccctgagaaatctgcagcctgggtctgagtacactgtgaccttgatggctgtgaaaggcaaccagcagagtcccaaagccaccggagtctttactaccctgcagcctctgcgctccattccaccttataacaccgaggtgacagagaccacaatcgtgatcacctggacccccgctccaaggattggcttcaagctgggtgtacgaccaagccagggaggtgaagcaccccgagaagtgacttcagactcaggaagcatcgttgtgtctggcttgactccaggcgtggaatacacgtacaccatccaagtcctgagggacggccaggagagagatgcaccaattgtcaaccgagtagtgacaccgctgtctcccccaaccaacttgcacctggaggccaatcctgacactggagtgcttaccgtctcctgggagaggagcaccaccccagatattactggctacagaataaccaccacccccacaaacgggcagcagggaaccgctttggaagaagtggttcatgccgatcagagttcctgcacttttgaaaaccgtaatcctggcctggagtacaatgtcagtgtttacactgtcaaagatgacaaggaaagtgcccctatctctgataccgtcatcccagaggtgccccagctcactgacctaagctttgttgatataactgactcaagcatcggcctgaggtggaccccgctaaactcttccaccattatcgggtaccgaatcacagtagttgcggcaggagaagggatccccatttttgaagattttgtggactcctcagtaggatactacacagttacagggctggaacccggcattgactatgacatcagcgttatcactctcattaatggcggagagagtgcccctactacactgacacagcaaacggccgtccctcctcccacggatctgcgattcaccaatatcggtccggacactatgcgggtcacttgggccccgcctccgtccattgagctaaccaacctcttggtgcgctactcacctgtgaagaacgaggaggatgtggcagagctgtccatttcaccctcagacaacgccgtggtcctaacaaatctcctgcctgggactgagtacctagtcagtgtctccagcgtgtacgaacagcatgagagcatacctctcagaggaagacagaaaacaggtctggactccccaactggttttgattcttctgatgtcaccgccaactcattcaccgtccactgggtggctcctcgggcccccatcaccggctacatcatccgccatcacgccgagcattctgccggaagacccaggcaagaccgagtgccgccctcaaggaattctatcaccctcaccaaccttaatccgggcacggagtacattgtcaccatcattgctgttaatggcagagaggagagccccccactgattggccagcaatccacggtttccgatgtcccgagagatctggaggtcatcgcttccacccccaccagcctgctcatcagttgggaaccccccgccgtctctgtgcgctattacagaatcacctatggagagacaggaggaaatagccctgtccaggaattcactgtgcccggaagcaagtccaccgccaccatcaacaacattaaaccaggagcagactacaccatcaccctgtatgctgtcactggccgtggggacagtccagccagcagcaagccagtttccatcaattatcaaacagaaattgacaagccatcccagatgcaggtgacggatgtccaggacaacagcatcagtgtcaggtggctgccttcaacttctcctgtgacaggttacagagtgaccaccgctcccaaaaatggcctaggaccaacaaaatctcaaactgtcagtccagatcaaacagaaatgaccattgaaggtttgcaacccaccgtggagtatgtggttagtgtctatgctcagaaccggaacggagaaagccagcccctggttcagactgcagtgaccaacattgaccgccctaaaggactggcattcactgatgtggatgtcgattccatcaaaattgcctgggaaagcccacaggggcaagtttccaggtacagggtgacctactcaagccctgaggatggaatccatgagcttttccctgcgcctgatggtgacgaggacacggcagagctgcacggcctcaggccgggttctgagtacacagtcagtgtggttgccttgcacggtggcatggagagccagcccctgattggagtccagtccacagccattcctgcgccaaccaatctgaagttcactcaggtgtcacccaccaccttgactgcccagtggacagcgcccagtgttaagctcactggctaccgagtgcgggtgaccccgaaggagaagacaggaccaatgaaagaaatcaacctttctccagacagcacctccgtgattgtgtcagggctcatggtggccaccaagtatgaagtcagcgtctatgctctcaaggacacattgacaagcagaccagctcagggagtcgtcacgactctggagaatgtcagccctccaagaagggcccgtgtgaccgacgctacagaaactaccatcactattagctggagaacgaagacagagacgatcactggcttccaagtcgatgccattccagccaatggccagaccccggttcagaggaccatcagcccggatgtcagaagctatactattacaggtttacagccaggcactgactacaagatccacctgtacacgctcaacgacaatgcccggagctctcctgtggtcattgatgcctccacggccattgatgccccatccaacctgcggttcctgaccaccacacccaactccttgctggtatcatggcaggcaccccgtgccaggattactggctacattatcaagtatgagaagcctggatcccctcccagagaagtggtccctcggccccgccctggtgtcacggaggccaccatcactggtctggagccaggaaccgagtacaccatctatgtcatcgcactgaagaacaatcagaagagtgagcccctgattgggaggaaaaagacagatgagcttccccaactggttacccttccacaccccaatcttcatggaccagagatcttggatgttccctccacagttcaaaagacccccttcgtcaccaaccctgggtatgacaccgaaaatggtattcagcttcctggcacatcccaccaacaacccagtgttgggcaacaaatgatctttgaggaacatggctttaggcgaaccacgccacccactgcggccacccccgtcaggcttaggccaagaccatacctgccgaatgtagatgaggaggtccaaatcggtcatgttcccaggggagacgtagactaccacctctatcctcatgttccggggctcaatccaaatgcctctacaggacaagaagctctctctcagacaaccatctcttggacgccattccaggagagttctgagtacatcatttcatgccaacctgttggcactgacgaagagcccttacagttccaagttcctggaacttctaccagtgcgactctgactggccttaccagaggggtcacctacaacatcatagtggaggccctgcacaaccagaggaggcacaaggtccgagaagaggttgttactgtaggcaacactgtcaacgaaggcctgaaccagcctacggatgactcatgctttgacccttacacggtttcccattacgccgttggagaggaatgggagcggttatctgactctggctttaagctcacttgccagtgcttgggctttggcagtggtcatttcagatgcgattcatctaaatggtgccatgacaacggtgtcaactacaagatcggagagaagtgggatcgtcagggagaaaatggccagcggatgagctgcacatgtctcgggaatggaaagggagaattcaaatgcgatccccatgaagcaacgtgttatgacgacgggaagacctaccacgtaggagaacagtggcagaaagagtatctcggagccatttgctcctgcacgtgtttcgggggccagcggggctggcgctgtgacaactgccgcagacctggggctgctgaacccagtcccgatggtaccactggccacacctacaaccagtatacacagagataccatcagagaacgaacactaatgtaaattgcccaattgaatgcttcatgccgttggacgtgcaggctgacagagatgattccagagagtaatctttccatccagcccaagccaacaagtgtctctctaccaaggtcaatccacaccccagtgatgttagcagaccctccatttctgagtggtcatttcacccttaagccttctgctctggagtcaagttctcagcttcagctcaacttacagcttctccaagcatcgccccgcgggatgttttgagacttccctcttaaatggtgacagttggtgccctgttctgcttcagggtattcagtactgctcagtattattgtctaagagaatcaaaagttcttgtgatttggtctgggatcaaagggaaacacaggtagccaaccacgatgcaatgaattgaatggtagtacccaagagcgggagcaggaagttaaaccagacagttctgctttcttttgccgtctgatctgcagcactgtcaggaggcctgtcctgtggctgtgtccaaacaccccacaggactcactgtcccaacaatcctaattgcctagaaatatctttctcttacctgttatttatcaatttttcccagtatttttatacggaaaaaattgtattgaagacactttgtatgcagttgataagaggaattcagtataattatggttggtgactatttttataatgtacatgccaacactttactactgtggaaagacaagtgttttaataaaaagatttacattccat

SEQ ID NO: 114 - DNA, 1018 bp, Rattus norvegicus
  Genbank Accession No. NM_019170
cagctgcagagtttaccccaggttctttggtctccgacggcctttctacgcacacgcagccatgtcttccgacagacccgtggcactggtgactggtgctaacaaaggaatcggattcgcgatcgtacgtgatctctgtcgtaaattcttgggggacgtggtcctcacggcgcgggacgagtcacggggccacgaggcggtgaagcagctgcagaccgagggcctgagcccacgcttccaccagctggacatcgacaacccgcagagcatccgcgcgctgcgtgactttctgcttcaggagtacggaggactgaacgtgctggtcaacaatgcgggcatcgccttcaaagttgttgaccccacccccttccacattcaagcagaggtgacaatgaaaaccaacttttttggtacccaagatgtctgcaaggagctactccctataataaaaccccaaggcagagtggtgaatgtatcaagcagcgtgagtctcagggccctgaaaagctgcagcccggagctgcagcagaagtttcgaagtgagaccatcactgaggaagagctggtggggctcatgaacaagtttatagaggatgcaaagaaaggagtccatgcgaaagaaggctggcccaatagtgcatatggggtcaccaagataggggtgacagtcctgtccagaatctatgccaggaaactcaatgaggagaggagagaggacaagatcctcctgaatgcctgctgccctgggtgggtcagaaccgacatggcaggaccaaaagccaccaaaagcccagaagaaggagcagagacccccgtgtacttggcccttttgcctccaggtgcagaggggcctcacgggcagtttgttcaagataaaaaagttgaaccatggtgaatccaactctcacccccaccccttctatcctgacttggtgaaagccaagggacatttataatataccatcacttctggaaaaataaacataactaagtctttaagcacacaacaggtgtttgc

SEQ ID NO: 115 - DNA, 1856 bp, Rattus norvegicus
  Genbank Accession No. NM_019184
gtctccctgagaaggctgccatggatccagccctagtcctggtgctcactctctcctctctgcttctcctctcactctggagacagagctttgggagagggaagctccctcctggtccaacacctctcccaatcattggaaacacccttcagatatatatgaaggacatcggccaatcaataaaaaagttttcaaaagtctacggccctatatttactctgtatttgggcatgaagccctttgtggtgttgcatgggtatgaagctgtgaaggaagctcttgttgatctaggagaggaattttctggaagaggcagttttccagtatctgaaagagttaacaagggccttggagtcatttttagcagtgggatgcaatggaaggagatccggcgtttctccatcatgaccctgaggacttttgggatgggcaagaggaccattgaggaccgtattcaagaggaggctcagtgccttgtggaggaactgaggaagagcaaaggtgccccttttgatcccacctttatcctgggctgtgctccctgcaatgtgatatgctccattattttccagaatcgccttgattataaagatccgacttttcttaacttgatgcacagatttaatgaaaacttcaggcttttcagctccccatggctacaggtctgcaatactttccctgccattattgattacttccctggaagtcataaccaagtacttaagaatttcttctatataaaaaactatgttttggagaaagtaaaagaacaccaagagtccttggacaaggacaatcctcgggacttcattgattgtttcttgaacaaaatggaacaggaaaagcacaatccgcagtctgagtttacccttgaaagcttggtggctactgtaactgacatgtttggagctggcacagaaacaacaagtaccactctgaggtatggactcctgctgctgctgaaacacgtggatgtcacagctaaagtccaggaagagatagaacgtgtaattggcagaaaccggagcccctgcatgaaagacaggagccagatgccctacacggatgctgtagtgcatgagatccagagatatattgaccttgtccccacaaacctgcctcatttagtgacacgtgatataaaattcagaaactacttcattcccaagggtaccaatgtgatagtatcgctgtcatccatactgcatgatgacaaagaatttcctaatccagagaagtttgaccctggtcactttctagatgagagaggtaactttaagaagagtgactactttatgccattctcagcaggaaagaggatatgtgcaggagaagccctggctcgcacggagctgtttttgttcttcaccaccattttacagaattttaacctgaagtctctggttgatgtaaaagacattgacacaacaccagctatcagtggatttggccatttgccccctttttacgaggcttgttttattcctgtgcaaagggcagactctctaagctctcatctgtaatgtctcttctgagggtcctgtctacttcattcttggtactatagtagctttaactcacatatccccatttccttcggatccagtgaacatcaaacctcattgagttgagttccctgagtcaatatatagttctattcctgttccctatatcttgtgacgttccctatatcttgtgacattcccatgcagtacttacatagttagtgctaatacttgtatgacttcattactgttaatactgttttcactatataaaagcaaaatattttagaatatgagaattcagagtcatctgttcccttcatgtgctaaataaatactaatttttggacc

SEQ ID NO: 116 - DNA, 1134 bp, Rattus norvegicus
  Genbank Accession No. NM_019212
atgtgtgacgaggacgagaccaccgctcttgtgtgtgacaacggctctggcctggtgaaagctggctttgccggggatgatgcccccagggctgtgttcccatccatcgtgggtcggccccgtcaccagggtgtcatggtcggtatgggtcagaaggattcctacgtgggcgacgaggcccagagcaagcgaggtatcctgaccctgaagtaccccattgaacacggcattatcaccaactgggacgacatggagaagatctggcaccacaccttctacaatgagctgcgtgtggcccccgaggagcacccgaccctgctcactgaggcccctttgaaccccaaagctaaccgggagaagatgactcaaatcatgtttgagaccttcaacgtgcctgctatgtatgtggctattcaggcggtgctgtctctctatgcctccggccgaaccaccggcatcgtgttggattctggggacggtgtcacccacaacgtgcccatctatgagggttatgccctgccacacgccatcatgcgtctggacctcgctggtcgcgaccttactgactacctgatgaaaatcctcaccgagcgtggctattccttcgtgaccacagctgaacgtgagattgtgcgcgacatcaaagagaagctgtgctacgtggccctggacttcgagaatgagatggccaccgctgcctcttcctcctccctggaaaagagctatgagctgcctgacgggcaggtcatcaccatcggcaatgagcgcttccgttgcccggagacgctcttccagccttcctttatcggtatggagtctgcggggatccatgagaccacctacaacagcatcatgaagtgcgacatcgacatcaggaaggacctgtacgccaacaacgtcatgtcagggggcactaccatgtaccccggtatcgctgaccgcatgcagaaggagatcacagctctggctcccagcaccatgaagatcaagatcatcgccccccctgagcgcaagtactcagtgtggatcggcggctccatcctggcctcgctgtccaccttccagcagatgtggatcaccaagcaggagtacgacgaggccggcccctccattgtgcaccgcaaatgcttctag

SEQ ID NO: 117 - DNA, 2435 bp, Rattus norvegicus
  Genbank Accession No. NM_019232
actgttggctaagccggtctcactgctcctttagtctctttggacactttccaaatatcggggcgatgaccgtcaaaaccgaggctgctcgaagtaccctcacctactccagaatgaggggaatggtagcaatcctcatcgctttcatgaaacagagaaggatgggcctgaacgattttattcagaagcttgccaacaactcctatgcatgcaaacaccctgaagttcaatcctatttgaaaatctcccaacctcaggagcccgaacttatgaacgccaacccctcacctcctccaagtccctctcaacaaatcaacctgggtccatcctcaaatccccacgccaaaccctctgacttccacttcttgaaagtgatcggaaaaggcagttttggaaaggttcttctagcaaggcacaaggcagaagaagcattctatgccgtcaaagttttgcagaagaaagccatcttgaagaagaaggaggagaagcatattatgtcagagcgcaatgttctgttgaagaatgtgaagcaccctttcctggtgggccttcacttctctttccagactgctgacaaactctacttcgtcctagactacattaatggcggagagctgttctaccatctccagagggagcgctgcttcctggaaccccgtgctcgcttctacgcagctgaaatagccagtgccttgggttatctgcactccctaaacatcgtttatcgagacttaaaaccagagaatattctcctagactcacagggacacatcgtcctcactgactttgggctctgcaaggagaacatcgagcacaatgggacaacgtccaccttctgtggcacgcctgagtatctcgctcctgaggttctccataagcagccgtacgaccggacagtggactggtggtgcctcggggctgtcttgtatgagatgctctatggcctgcctccgttctacagccggaacacagccgagatgtatgacaatattctgaacaagcctctccagctgaaaaatatcaccaactcagcaaggcacctgctggagggcctcctgcagaaggaccggaccaagaggctgggtgccaaggatgactttatggagattaagagtcatattttcttctctttgattaactgggatgatctcattaataagaagatcacgcccccatttaacccaaatgtgagcgggcccagtgaccttcggcactttgatcccgagtttactgaggagccggtccccagctccatcgggcgatcccctgacagcatccttgtcacagccagtgtgaaagaagccgcggaagccttccttggcttctcctatgcccctcctatggactccttcctctgaaagctcccaggatggttccgaaggatttcctcagcgtttttctaaagtgttttagttagcctttggtggagttaccagctgacagaacatcttagaagagaaatttgcacaccaggaagcttggcagtcccgcctgccggggcctgcacgcggcttgttgacgcggaagctttccggaagctttccgaagagcacatcctcctctcagtgagctagtgaggtcttcatttcttttcttccttccaacgtggtgctagctctaaaggagcttgagagtgccgcctgagacgcaccttggtctcagtgagaaggaagatgcaggtctaagagggatctccgcaggtctgagctgtgatcaagaatattctgcaatgtgccttttctgagattgtgttagctccaaagcttttcctatcgcagagtgtccagtttttgtttgtttttttttttttgttttgttttttgtttcttttttttcccaacccttgcgtatttcccatgtgtgcagttagtgtgagtgctatgcctgatcacagacagttttgttgtaagcatcaatgtgacacttgcaggacactacaatgtgggacattgtttgtttcttccacatttggaagataaatttatgcgcagactgtttttttttgtaagatataataactaaaacctattgaaacggtcttgcagtgacgagcatccagatgcttgagggaagcattgctgctacaaatatttctatttttagaaagggtttttatggaccaatgccccagttgtcagtcagagccgttggtgttcatgttaaaatgtcacctgcaaaatgggcattatttatggttccccccaacctttgttcattttcttttgcattcctgattattgtgtgtaaagaaagtctgtacattgggttataacactagatatttaaacttacaggcttatttgtaaaccatcattttaatgtcctgtaattaacatggttataacatgtacactcccccctactcaccacacaactttttttgtgtgcggtgaaaccaattttggtttgcaataaaatcttgaaaactatttgcg

SEQ ID NO: 118 - DNA, 1736 bp, Rattus norvegicus
  Genbank Accession No. NM_019242
tctcacccgcgccgctcctcgcctctcttgttagccggagactcgcctctcagccgcccgccgcacagacgcacgagtatacagtgcagctccatcggctgatccttgctgagctccaagtgtaggcggcaccgggcggcccacgatgccgaagaacaagaagcggaacgctccccaccgcggtggcgggggtggcggcggctccggggcagcgacgtcggcggccacgacaggtggcccgcatcggactgttcaacctttcagtgatgaagacgcatccattgaaacaatgagccactgcagtggctatagcgatccttccagtttcgcggaggatggaccagaagttcttgatgaggaaggaactcaggaagacttagagtacaagttgaagggattaattgacctaacccttgataagagtgcgaagacaagacaggcagctcttgaaggtgttaaaaatgcgctgtcttcaaaagtgctgtatgagtttgttctcgagagaagaatgactttaactgatagcattgagcgctgtctgaaaaaaggaaagagtgatgggcagcgcgcagctgcagcgctcgcgtccgttctttgtattcagttgggccctggattggaaagtgaagagattttaaagactcttggaccaatcctaaaaaaaataatttgtgatggaacagcgagtatccaggctaggcagacttgtgcaacttgctttggtgtttgctgttttattgccacagatgacatcactgagctgtattcaactctggagtgcttggaaggtatcttcaccaagtcctaccttaaagagaaagacacgaacgttccttgcagcactcctaatacagtgcttcacatcagctcgcttctcgcatggacgctactgctgaccatatgcccaatcagtgaagtgaagaaaaagctggagctgcatttccataaacttccaagcctcctttcttgtgatgatgtaaacatgagaattgctgctggcgaatctttggcacttctgtttgaattggccagaggaatggagagtgactttttttatgaagatatggattctttgacccagatgctccgggctctggctacagatggaaataaacaccgtgccaaagtggacaagagaaagcagcgctctgtcttcagagacgtcctgagggctgtggaggaacgggattttccaacagaaactgttaaattcggtcctgagcgcatgtatattgatagctgggtcaaaaagcacacctatgacacgtttaaagaggctcttggatcagggatgcagtaccacttgcagacaaatgaattccttcgcaatgtatttgagctggggccccctgtgatgctcgatgctgcaacacttaaaaccatgaagattcctcgttttgaaaggcatttatataactctgcagctttcaaagctcgaacaaaagcccgaagcaaatgccgagataagagagcagatgttggagaattcttctagatgtctgtctttgatgtctgttttctaatttcttcctttattattatttttgctacttctaatgtacataagcttttagagacttttttatcttggtcaacttagataatttttgatgtagggatgggttatattttaatttaatgtacagtgttacaaattaatgagttctttattctgtaaaaataactgataaccacaaataaaagtgtttgtgatgcttggtcaaaaaaaaaaaaaa

SEQ ID NO: 119 - DNA, 1253 bp, Rattus norvegicus
  Genbank Accession No. NM_019247
gaattcgggcccccagccaccaccgggagtctgcctgctgcgggacacactagccctccctccatggagtttgggctgcttggtgaggcagaggctcgaagccctgcgctgtcattgtcagatgcaggcactccacaccctccgcttccagaacatggctgcaaggggcaggagcacagtgactcggagaaggcctcggcctcactgccggggggctcccctgaggatggctccctgaagaagaagcagcggcggcagcgcacgcacttcaccagccagcagctgcaggagctggaggccaccttccagaggaatcgctaccccgacatgagcacgcgcgaagagatcgccgtgtggaccaacctcactgaggcccgcgtgcgggtgtggttcaagaaccggcgcgccaagtggcggaagcgggagcgcagccagcaggcggagctgtgcaagggcggcttcgcagccccgctcgggggcctggtgccaccctacgaggaggtgtacccgggctacacgtacggcaactggccgcccaaggcgctcgccccgccgctcgccgccaagaccttcccgttcgccttcaactcggtcaacgtggggcctctagcttcacaacctgtattctcaccgcccagctccatcgctgcctccatggtgccctcggcggccgctgccccgggcaccgtcccaggtcccggagccttgcagggcctgggcggggcaccccccgggctggctccagccgccgtgtcctccggggcagtgtcctgcccttacgcctcggccgccgcagccgccgctgcagccgcctcctccccttatgtataccgggacccgtgtaactcgagcctggctagcctgcggctcaaagccaagcagcacgcctctttcagctaccccgccgtgcccgggccgccgccggccgctaaccttagtccctgccagtacgccgtggaacggccagtgtgaaccgcaggtctgtggatccatccccgagggcggggcagtaattcacagcctctctggacaggggtcgcctagactggcttgcccttcgtcccagggtctgaaaaggggtgccagagcacccgggaagaggcggctccgaagagggccttttccctcacagcccctgaggggtggtctgacccctatacggagaccgcggccctgggactaaggccaggaacagggaccagctcccccggggccaattcacccttggctcaccccgccttctccccgaattc

SEQ ID NO: 120 - DNA, 2781 bp, Rattus norvegicus
  Genbank Accession No. NM_019257
cgtggatttcacacaggatagcaattacctgttgactggaggacaggacaaactgctgcgcatatacgacttgaacaaacctgaagcagaacgaggagttgagttcgtgtgtgtagggaggcagacagctccgacgcagactacggacctctccaggtctcagccgtcaaagaccctgtccggtaggaaacactagccggggatcatgagtggctgtcgagtgttcattgggagactaaatcccgcagcgagggagaaagatgtggaaagattcttcaagggttacggacggatcagagatattgatttgaaaagaggttttggttttgtggaatttgaggacccaagggatgcagatgacgctgtttatgaacttgatgggaaggaactttgcagtgaaagggttactatggaacatgctcgggctcggtctcgaggtggaagaggtagaggacgatactccgaccgttttagcagtcgcagacctcgaaatgatagacgaaatgctccacctgtaagaacagaaaatcgacttatagttgagaatttatcctcaagagtcagctggcaggtttgttgaaatacagttttgatattttaatgtggcatttaagaatgttaatgggtagttaatgttttattaatatatcttaaattattgctttatcttaaattaatggatttaattcaattataattttaaactttagttaaatgtaactgggggatgtttcagattttaatattagtgatcaaatgtaaatgttttgaggttattttttcatgttttttaaaatcaattttaaccaaatattaaaccctttatttgccagcctatctgtgtcgttggccttatgacgaggagtgcctgtgggttatcctaatcgttgtcttggtcactcttggttgggcctggttgactttgccagtcagctcctacagtgatcagttggccacctctagagatctgtgtttgccggtctagacgtaatcggtgcacttacttgaagtgccgggttgcagcgattccagaacgttgataacgtgatctgatccctaagttgagagctgtcttcctgtaacgcttccgaataagaggtcctggtcgaaagagttgaaagatacgaaattagttggtcgttggaatcctgatcgcagtaaagtggtccttggtaactgcacacgagtaaaacatgtctgcatcgccagtagtctgctaatagggagggctgtgcgattaaaggcttccatcgattgggtagtatccttcaagtgggtggcgaagagccagtcgggcctatgtcatgaaggtttctccgaccgcttaatggtttgctgcttgactgagcctagggaaatgttaataaaggtaaagtaaatttttttaatgacatatggggcacaaaataactggtgtctttgtaaatgttgttttacttttttttttgtttttgttttttttaaatataagactagtctttaaaagatgtactgttcctttttgtttttttgttgtttgttttgtttttttgtttgtttttccccctttttgtactgagctcagttagactaatactataatgttaaaaactggaatttcctctagcattttgcttaaaagcaatatgctatttgcttatttcgtgccctggcatactttttgaattccgatagaatacaagtgtggtatatgccatgtttgtactatctaacaacttctcttccagtagtcttgtttataccatgtggttgtttgtgtgtcacttttccctttctctccttaacataattgtcttgtgttaaggatctcaaaaagatttcatgagacaagctggggaagtaacctttgcggatgcacatcgacctaaactaaatgaaggggtagttgagtttgcctcttatggtgacttaaagaatgctattgagaaactttctggaaaggaaattaatgggagaaaaatcaaattaattgaaggcagcaaaagacacaggtcaagaagcaggtcacgatctcggaccaggagttcctctaggtcccgtagccgatcccgttcacgcaggagcaagtcttacagccgatcaaggagcaggagccggagccggagcaagtcccgttctggtagtaggtctcccgtgcctgagaagagccagaaacgtggttcttcgagtagatctaaatctccagcatctgtggatcgccagaggtcccgatcccggtccaggtccagatcagttgacatggcaattaattaaactgtaaataacttgcctgggggcctttttttaaacaaaacaaaacaaattcccaaaccatacttgctaaaaattctggtaagtatgtgctttttctgtggggtgggatttggatggggttgggctggatttctttgtagatgtggaccaccaaggggttggtgaaaactaattgtattaaatgtcttttgataagccttctgctcacacttttgtgactgtctgaagtatatagttgtgtatatgatagagctcttttataactaaacgatttaattttttgtactgaaaaaatttgaatattttagttcatgttcagatatgttaacataagattagtttaatttgctcaattaaactaatgaatagctttggacactttaaaagagctctaaatttgcttgtatataaaagcttagtttgagttttccttgttagggtcaagggtgtcttcttgcccattaacagctgtagatagacttaaagcagctgtttgttactgataataaaatactaagtattataaaa

SEQ ID NO: 121 - DNA, 1136 bp, Rattus norvegicus
  Genbank Accession No. NM_019262
gggcttcttggacgtttttgggaggggacagcaagggaaggtccttctgcctctagggacccagacttccgctttctgcagacagcagcaggctctgggctctgggaatccactgctgtctggcctagaagcatcatagaacacgaggattccatacacaggaggcccctgaagctgagctgagctgatgaagacacagtggagtgagatcttgacacccctgttgctgctgctcctgggtttgctccatgtctcctgggcccaaagcagctgtactgggtcccctggcatccctggggtccctggcatccctggggtccctggctctgatggcaaaccaggcactccagggataaaaggagagaaagggctccccggactggctggagaccatggtgagttaggagagaaaggggatgcagggatccctgggatcccaggcaaagttggccccaagggtcccgtcggccctaagggtgctccaggcccccctggaccccgcggtcccaaaggtggctctggagactacaaggctacccagaaagtagccttctctgccctgaggacggtcaacagcgccctgcgaccaaaccaggccattcgcttcgaaaaggtgatcaccaatgttaatgataactacgagccgcgcagtggcaagttcacctgcaaggtacctggcctctactacttcacctaccacgccagttcccgcgggaatctgtgtgtgaacatcgtgcgcggccgcgaccgagaccgcatgcagaaagttctcaccttctgcgactatgcccaaaacaccttccaggtcaccacgggtggggtagtcttgaagctggagcaggaagaggttgttcacctgcaggccacagacaagaactccctgctgggcgtcgagggagccaatagcatcttcactggctttctgcttttccctgacatggatgtatgatcacggggtcaaatcactcctatccaaaacctcctccctgccagtaatcctccctggaccccagacactgccctttgactgcccaaagccctgaccagagccctgtagatgttacagaatgggtaaataaactcttcaaggccaagaaaaaaaaaaaaaaaaaaaaaaaaaaaaaaaaaaaaaaccc

SEQ ID NO: 122 - DNA, 1940 bp, Rattus norvegicus
  Genbank Accession No. NM_019283
cacaaccaccaaatatatccacacgttgacgtgatttcttgcccttactcacactaagcccgcgtgtcgatccatctctatggatcccgaacctactgaacactccaccggcggcggctcggttccccgccagccgcccagcgcgcagacggggcttgatgtccaggttgtcagcgcagctggcgactcaggtaccatgagccaggacaccgaagtggacatgaaagatgtggagctgaacgagctggaaccggagaagcagcctatgaatgcagcggacggggcggcagccggggagaagaacggtctggtgaagattaaggtggccgaagacgaggcggaagccggggtcaagttcacaggcttatccaaggaggagctattgaaggtagctggcagcccgggctgggtgcgcacccgctgggcgctgctgctgctcttctggctcggttggctgggtatgctggcgggcgccgtggttatcatcgttcgggcgccacgctgccgtgagctgccggtacagagatggtggcacaagggcgccctctaccgcatcggcgaccttcaggccttcgtaggcccggaagcgagaggcatagctggtctgaagaaccatctggagtacttgagcaccctgaaggtgaagggcctagttttgggcccaattcacaagaaccagaaggatgaagtcaatgaaaccgacttgaaacagattgatcccgatttaggctcccaggaagattttaaagaccttctacaaagtgccaagaaaaagagcattcacatcattttggacctcactcccaactataagggccagaatgcatggttcctccctcctcaggctgacattgtagccaccaaaatgaaggaggctctgagttcttggttgcaggacggtgtggatgggttccaagttcgggatgtgggaaagctggcgaatgcatccttgtacttggctgagtggcagaatatcaccaagaacttcagtgaggacaggcttttgattgcagggaccgcgtcctctgacctgcaacaaattgtcaacatacttgaatccaccagcgatctgctgctgaccagctcatacctgtcacagcccgttttcactggggagcatgcagaactcctagtgattaagtatttgaatgccactggcagccgctggtgcagctggagtgtgtcgcaggcaggactcctgacatcctttataccggctcagtttctccgactctaccagctgctgctcttcactctgccaggaactcctgttttcagctatggggatgagcttggccttcaggcagttgcccttcctggacagcctatggaggctccattcatgctgtggaatgagtctagcaactcccaaacctcaagtcctgtaagcctcaacatgacagtgaagggccaaaatgaagaccccggctccctcctcacccagttccggcgactgagtgacctccgtggtaaggagcgctctctgttacacggtgactttgatgcactgtcttcctcatctggcctcttctcctacgtccgccactgggaccagaatgagcgttacctggtggtgctcaacttccaggatgtgggcctgtcagccagggtaggagcctccaacctccctgctggcataagcctgccagccagtgctaaccttttgcttagtactgacagcacccggctaagccgtgaggagggcacctccctgagcctggaaaacctgagcctgaatccttatgagggcttgttgttacagttcccttttgtggcctgatccctctacacagaacctgccacccttctttcctctctcaggcctttggaattctggtctttctctccttattttgtttttgtttttaaacttttgcagattacatatgaattcttacactgggtgtttttgtcttcaaaataaaaaaaatcacccctgc

SEQ ID NO: 123 - DNA, 1430 bp, Rattus norvegicus
  Genbank Accession No. NM_019289
atggcttaccacagcttcctggtggaacccatcagctgccatgcctggaacaaggaccgtactcagatcgccatctgccccaacaaccacgaggtgcacatctacgagaagagcggtgccaagtggaacaaggtgcacgagctcaaggagcacaacgggcaggtgacaggcatcgactgggcccccgagagtaaccgcattgtgacctgcggcacagaccgcaatgcctatgtgtggacgctgaagggccgcacgtggaagcccacgctggtcatccttcggattaatcgagctgcccgctgcgtgcgctgggcccccaatgagaacaagttcgccgtgggcagtggctcccgtgtcatttccatctgttattttgagcaggagaatgactggtgggtgtgcaaacacatcaaaaagcccatccgctccactgtccttagcctggactggcaccccaacaacgtgctcctggctgcaggctcctgtgacttcaagtgcaggatcttctctgcctatatcaaggaggtggaggaacggccagcccctacaccgtggggctccaagatgccctttggggagctgatgtttgaatcgagcagcagctgtggctgggtgcatggtgtctgcttctcggccggtgggagccgagttgcttgggtcagccatgacagcactgtgtgcctggtagatgctgagaagaagatggccgtggcaaccctggcctctgagacattaccgctcctggccatcaccttcatcacagaaaatagtctcgtggcagcgggccacgactgcttcccggtgctgtttacctatgacaacgctgcggggacattgagctttggtggccggctggatgtgcccaagcagaactcccagcgtggcctgacagcccgagagcgcttccagaacctcgacaagaaggccagctctgaagggggtgcagccacaggggctggcctggattcactgcacaagaacagcgtcagtcaaatctcggtgctcagcgggggcaaggccaagtgctcgcagttctgcaccacaggcatggacggtggcatgagcatctgggatgtgaagagcttggagtcagccttgaaggacctgaagatcagatgagctgtgaggagtgctgtcctcatcccacatgctggggaggagggaaaggggttggggaggctaagggctgctttgctgaatgcttctagggtgtagtacaggtctgcaaaggggatgctctctctccaaagaggggaagaggaaggtggggaactttcctgcctatttaatgaaaatgtgccttttaaagagatgctttcattcattgcaaaccaaaaacaagacaaaaaacccaaagcacaatgctggtcataaactgcttcaaaatgtgggctaataaacataccaaatgtgaaaaaaaaaaaaaaaaa

SEQ ID NO: 124 - DNA, 1459 bp, Rattus norvegicus
  Genbank Accession No. NM_019291
gcgtgactatgtcccaccactggggatacagcaagagcaacggaccagagaactggcacaaggagttccccattgccaatggagaccgacagtcccctgtggacattgacaccgggactgcccagcatgacccttccctacagcctctgctcatatgttacgataaggttgcttccaagagcattgtcaacaatggccattccttcaacgttgagtttgatgactcccaggactttgcagtgctgaaagagggacccctcagtggctcctacagattgatccagtttcactttcactggggctcatctgatggccagggctctgagcacaccgtgaacaaaaaaaaatatgctgcagagcttcacttggttcactggaacaccaaatatggggattttggaaaagctgtgcagcacccagatggactggctgttttgggtatttttttgaagattggacctgcctcacaaggccttcagaaaatcactgaagcactgcattccattaaaacaaaggggaaacgtgcagcctttgctaactttgatccttgctcccttcttcctggaaacttggactactggacatatcctggctctctgaccactccgcccctgctggaatgtgtgacctggatagtgctcaaggaacccattactgtcagcagtgagcagatgtctcatttccgtaaactgaacttcaattcggagggggaggctgaagaactgatggtggacaactggcgtccagctcagccgctgaagaacagaaagatcaaggcgtcctttaaataaaatgaccctgcagctggggtccaaaaagcacaagtgtggctgcctctctgtagctaagcacagttccgccttggtgattcagatcccgactttgcatctgatattgtaggcctttttacctctcacccattgtgcttactaataaaatgtgaaaaggaagacccaggtgtctcatgtggtggtagcatggtggcaggctggtggttgacttagggcatcctttctcagccacaacaatgcaatgcaaagaacagatatggcctcttgcttctccacagccatagaataatgagtactcaggcctgtttattaaaatgctatttttaaaaccatataaggtagaatgattgtttacaaatccacatcatgagacaaactgaggcaatttaggcaaatcaggtaaaacagtcatagttttatggttattaattagatgaatgttcactattccaagatcttatattaaagaaaaacttttaaaaagcttatatatttgtagcaaagttattcttaaatatgaattatgttgtaacttagtgacttttgatttctagaggtgtaaatgaagatgtaaaaattgatatagttgtgatacagagtatatttcccttcagataacttaccataacctaatggataatgtattttagatatattctctaataaaa

SEQ ID NO: 125 - DNA, 1811 bp, Rattus norvegicus
  Genbank Accession No. NM_019301
gcacgaggaccgctgtgaggggaatggaggcttcttcgcctctggaccccgtggggcgccttgtagccttctgccgcggaggagtgcatctggccgtcctgctgctgttcttgtcgccatctactttgggccagtgcccagccccaccactgtttccttatgccaaacctataaatccaactgatgaatccacgtttcccgttggaacatctttgaagtatgaatgtcgtccaggatatatcaagaggcagttctctatcacctgcgaagtaaactcagtgtggacaagtcctcaagacgtgtgtatacgtaaacaatgtgaaactcctttagatcctcagaatggcatagtacatgtaaacacagacatccggtttggatcctctatcacttatacctgtaatgaaggataccgcctcattggttcctcctctgctatgtgcataatctctgatcagagcgttgcctgggatgccgaggcacctatttgtgaatcaattccttgtgagatacccccaagcattcccaatggagatttcttcagtcctaacagagaagattttcattatggaatggtagttacctaccagtgcaacactgatgcgagagggaagaagctctttaacctggtgggtgagccctccatacactgtaccagcatcgatggtcaagttggagtctggagtggccctcctcctcagtgcattgaactcaacaaatgtactcctccccatgttgaaaatgcagtcatagtgtctaaaaacaaaagcttgttttccttaagggatatggtggagtttagatgtcaggatggctttatgatgaaaggagacagcagtgtgtattgtcgatccctaaacagatgggagcctcagttaccaagctgcttcaaggtgaaatcctgtggtgctttcctgggtgagcttcctaatgggcatgtattcgttccacaaaatcttcaactcggggccaaagtgacctttgtttgtaatacagggtatcaattaaaaggcaattcttctagtcattgtgttcttgatggagtggaaagcatttggaatagcagcgttcctgtgtgtgaacaagtgatatgtaaactccctcaggatatgagtggattccagaaagggttgcaaatgaaaaaagattattactatggagataatgtagccttggaatgtgaggatgggtatactctagaaggcagttctcagagccagtgccagtccgatgccagctgggatcctcctctgcccaaatgtgtctctcaagtgatatgtaaactccctcaggatatgagtggattccagaaagggttgcaaatgaaaaaagattattactatggagataatgtagccttggaatgtgaggatgggtatactctagaaggcagttctcagagccagtgccagtccgatgccagctgggatcctcctctgcccaaatgtgtctctcgctcaaacagtggtctaatagctggaattttcattgggataatcgtccttattttattcatcattttttcctactggatgattatgaagtttaaaaaacgcaattccaccaatgaaaagtgtaaagaagtgggtatctatttaaattctaaagaagacagctgtgttcagcctcagtctctgctcacaagtcaggagaacaacagtaccagtagcccagcacggaattcactcactcaagaagtctaatagccgccatgtacagtgatgtctctgaaacgcaaaacatttcctgtctgtatcacttttaaaataaactattttcttttaaaatctagatgtgttgttcctcgtgcc

SEQ ID NO: 126 - DNA, 3808 bp, Rattus norvegicus
  Genbank Accession No. NM_019335
gaactagcctgacctggacttgcccggcagaagcgacagtggtcggagggcgacgagattttaggggcagcacctgaagcacaattcgagtcctgcgccagggcacgggccattgtccggatccagaaagtcggtcaccggggaagaaaaatggccagtgatacaccaggtttctacgtggacaaacttaacaaatactcccagatacacaaagtaaagattatatataaagaaatttctgttacaggacctccacacgacagaaggtttacatttcaagttataatagaagagagggaatttccagaaggtgaaggtagatcaaagcaggaggcgaaaaataatgctgccaaattagctgtcgaaatacttgataatgaaaacaaggtggatagtcacacggatgcttctgaacaaggtttaatagaggggaactacattggccttgtcaattcttttgcccagaaggaaaatctgcctgtaaattttgaactgtgtgaccccgactcccaattgcctcacagatttatttgtaaatgcaaaatcgggcagactacgtatggtactggtttcggtgctaacaaaaaggaggcaaagcagttggctgccaaaaatgcgtatcagaagctgtcagagaaaagcccatcgaaaactggctttgtcacatctttatccagtgacttttccagcagctcgtctataacaagtaactctgcttctcagtcagcatctggaagggatttcgaggacatatttatgaatggtctcagagaaaaaaggaaatcaggagtaaaagtgccatctgatgacgtgctaagaaataaatataccttggacgacaggtttagcaaagattttgaagacatagaagaaattggctcgggtggatttggccaagttttcaaagcaaaacacagaatcgatggaaagacgtatgctattaagcgcattacatataacaccaagaaggcaaagcgtgaagtacaagcactagcagaactcaatcacgccaacattgttcaataccgagtttgttgggagggagaggactatgactatgatcccgagaacagcacaaacggtgacacaagtcgatacaagacccggtgcctctttatccaaatggaattctgtgataaaggaactctgcagcagtggttggaaaagagaaatcggagtcaagaggacaaggctttggttttggagttatttgaacaaatagtgacaggagtggattatatacactcgaaaggtttaattcatagagaccttaagccaggtaatatatttttagtggatgaaaaacacattaagatcggagactttggccttgcaacagccctggaaaatgatggaaatcctcgaacaaagtatacaggaactcctcaatacatgagtccagaacaaaagtcatcgttagtggaatatggaaaggaagtggacatctttgctttgggccttattctagctgaacttcttcacatatgcaaaactgattcagagaaaatagagtttttccaacttctaagaaatggcatcttctccgatgatattttcgacaacaaggaaaaaagccttctacagaaattactctcaagtaaacccagggaacgacccaatacgtctgaaatcctgaagactttggctgagtggaagaacatctcggagaaaaagaaaagaaacacgtgttagggcttttaactgcagtctgaagtggaatgtcagagaacaatgaacttcttctcttaacactctcccagacaggttttggtaagggtgacccaaagacattgtatttatcggctatgaacaagtatgcccgtttcctcaattgttaattgtcggacctgtggctggctagccaaatatggaaatgtttgtttctttctcgtctgcccgaagagaaagccaagccgcggtggagaaggtcacttaacccccaatgctaactgaaggcctaaggcttttgacatactaaagagctggcagccagagctgggagagaagaacctgcagacaggcaggcagagacacaaagacatggactagaatgaaacaggaaggtagagagattgagagacagagccacatggagagacgaaatggcagagtagtaggcttaagttagatgagctaactgagagactgccccagaaaacaggccaacagccttatacacagatgtctcagtgtctatcattaaactccaagcaggatcaatgaaggccctacaataggtttttttttcttgttacttcaaaaacaatcttacaaagttattttcttgagagttccatatgtgtattgtatcctgatcacactccaaaccttctgctgttcatgccttatcatgtgaactatacctctgaacgtgggagtccaaattgtccatctgctccttaacgttacttctcataggtagtttagtcgttgtgatgagaaaagtaatgaaatggtaccagaaatggggttttgtcgcaataaacctactgtgcggtttcttggactttcaggactggtttgtgggaagaatgtggaaaagtttgaagcagcaggctagagaagtcctcagatggtatacgtcaatcttaattctggtagctcagaagtctttgccaaaaaggaacccattgggaattggactagatgccaggacatttgtgtacaagtcaaaagactggtgagggaaatttcaagacattcagactgtggcatggtggttatctccttctcatagctagaattatagagcaaattaggaaggagtgaggggtaagaagtgagagaacaaagatctgggaatgagtgccttcaaagacgaggtcggtgcaaagctgttaaagcgattagtgcactgagggaagccatgtactttccattgctgccattataggaacaagactacagccacgggcggctgcacagcatggaaagtaaaagccctttaaaggtctttcgtgtcaaaagttccagcaggtgccacagccactccagtggagtctgtgtgacaggaagctcttgtgcttcgtttctatgcagaacagaggcctgtgcctggaatggcttgtcctcctggaggtcctggcagtctccctgcaaaaagatggtgaccagggtctatgctttcagtggaattgccttctgtgttctagccttggtgatcttagcgattttaagcctgtcaacaatatctgattttaggaatatagcagggtgggcagatgatcatgtatctttagatgtctcaggcactgaaataaataaatgtctcacaccatcatggtcctgatgaactcaatggctgcaatgaattcaactgctgtatccattagttcccagaaaataggagagaaattaattgcagttactaagaacatgactgttccagaaaaatctttccccccttttgggaaagttttgtttagcatgattcagaatagtaatgattcttttaaaaaagatcatagacaacttccaacaagttgaacaaacttaacagagttaactatggttacttttgcttccttactattctgaggggccataaatataatagagtttaaactttattaaaacaaaggtaaatgatgaatacatacctggtgcccaccagtctggcagtataactgcagttttctaaactattgttttcagctgagaattgttttctagactgtatgttccgctttcctccttgcaagggacatttggtgaggagatgaataagagctagatgattgccaattatgatgtatctgttctaactgtttaagtctatgccaaaaagtaaagctttttacaacaacac

SEQ ID NO: 127 - DNA, 1854 bp, Rattus norvegicus
  Genbank Accession No. NM_019358
ggagacataaattgccgactgtgctgagaagttgccagttgccaagtttgctgtgcttgctccctccgctcgccttgaaagcccgggcactctctgtcgctgggactcttgctcaccgcttgccagcctcctcagagctcttctcggctgggcctgtggcttcgaagtttttttgttttttcatcttttcacaacccacaaaaaccactagctgctgaggctccaacgagatcaagatgtggaccgcgccagtgttgctctgggttttggggagcgtttggttctgggactcagcgcagggaggggccatcggtgcgctagaagatgatcttgtgaccccgggtccaggagatgacatggtgaacccaggtctagaagacagaatagaaaccacggacactacaggagaactggataagtcaactgccaaggcgcctctggtaccaacacagcctcccattgaggaactgccgacctcaggaacctccgaccacgatcacaaagaacatgagagtacgaccactgtcaaagcggtgaccagccactccacggacaagaaaacaactcaccccaatagagataacgcaggcggtgaaacgcagaccacagataagaaagatggcttggctgtagtgaccctggtcggaatcataattggcgtcttgttagccattggcttcattggagggatcatcattgtggttatgaggaagatttctggaaggttctcgccctaaagagccaaacagaactggttgttctcccaacacatctgaaaataagagagcttccaccttgccctgttccccatccctcttcctgtggaggaagatgacccatggaatgcccacccacccctctcacagccatggtgacccctccacttgccagcagtaccaaaggaaagatacgggacaagccactggcccctcgaaccatctgcgtttggaaatcaaattttttaatataaatgttatgattgaggaccacatgcatagaaaaatggtgcaaaaaccgagacagtatcatcagctttatcaactgtaaccatgggttggttcttccgggccagtcccagtctgttaagaggcaaaagaatttggaaaatgttacctcacagaggcacgggtctttttgcagttgccaacctgcaaatgcagttgatgcatacatattccagcctagtggggtctgaatcagtgcattgaaagtataaacccaaaatcaggcgtgataggcagcccctcagggagcttcattataccttttcagaagcatccactgccttcagttcccggaagataccttgctttttacaagcctccaaaccctctctaagcctcagatgactcaatgacccagaggtctgtctactccactccccctggtgatggaaagcccaagttgaggaaccatgtcctcacctccctaggcctcaagccttcagatcaaccgcttctttctggacgatggagacctcatcccagatgctcagaaagtttgttggatgtcacaaaatgccagagcctcagccgctgtcgaaccaagaacgaaactcagtccttaagtggaagtgactcctgtgcctgctttaggctaggaaatgagaccaaccagtttctagcacctgccttctgcttcccaggaaagacggagaaaaaaataatcttgtatgttcttaactgcttctaggtggtggatggaaaggtttgatgttaatttccggtcttcgtgacataccacatcttcccatgaggactcggtgttgctggcacaagagctgtagtgtcttggttacctgtgttggtactcaatacagtgtagacatcttttcaaataaaatatgattgtgtg

SEQ ID NO: 128 - DNA, 2777 bp, Rattus norvegicus
  Genbank Accession No. NM_019370
gaaagaaagagccttattttctggctaaacaggtttacacagctacaggaacaatggattccaggctagctttagccacggaggagcccattaagaaagacagcctgaagagatataagatcctttgtgcggttcttcttgctttgctggtgatcgtgtcgcttggattgggcctgggcctgggactcaggaaacctgaagagcatataggcagctgcaggaaaaaatgctttgattcgtcacacagaggactggagggttgccgctgtgactccggatgcacagaccggggagactgctgctgggactttgaagatacctgtgtgaaatcaactcaaatctggacgtgtaattcgttccgctgtggggagaccagactagaggcagccctctgttcctgtgcggatgactgtctgcagagggaggactgctgcactgactacaaggctgtgtgccaaggagaagtcccatgggtgacagaagcctgtgcctcatcccaggagccccagtgtccagaagggtttgaccagccgccggttatcttgttctccatggacggctttagagctgagtacttacaaacatggagcaccctgctgccaaacattaacaaactgaaaacatgtggactccattccaaatatatgagagcagtgtatcccaccaaaacctttccaaatcattataccattgtcacgggtttgtatccagagtcgcacggcatcattgacaataacatgtatgatgtgtacctcaacaagaatttttcactttcttcagtggagaaaagtaaccctgcctggtggagtgggcagccgatttggttaacagcaatgtatcaaggcttaaaagctgcttcctactactggccaggatcagatgtggctgtcaatggctccttccctaacatctacaggaattacagcaattccgtcccatatgaaagtaggattgctacactgttgcaatggctggacctgcccaaagctgaacgacccagtttttacaccatatatgtggaagagcccgattctgcggggcacaagagtggaccagtcagtgctggagtcattaaagccttacagttagttgatgatgcctttgggatgttgatggagggtttgaaacagaggaatttacacaactgtgtcaacataatcgttctggctgatcatggaatggaccagacctcttgtgacagagtggaatacatgacagattattttcctgaaataaacttctacatgtaccaaggacctgcccctcgaatcaggactcgtaatatacctcaggacttctttacctttaattccgaagagattgtcagagacctcagctgtcgaaaatccgatcaacacttcaaaccctacttgactccggatttgccgaaacgactgcactatgccaagaacgtcaggattgacaaagttcatctaatggtggatcggcaatggctggcttacaggaacaaagggagttccaactgcgaaggcgggacacacggttacaacaatgaatttaaaagtatggaggcaatctttttggcacatggacccagctttaaagagaagactgttatcgaaccatttgaaaacatcgaagtctataatctactgtgtgatcttctgcacatccaaccggcaccaaacaacggttctcacggtagcctgaatcatcttctgaaggcaccattttaccagccgtcgcatgcagaagaattgtcaaagtctgctggctgtggttttactactccattgcctaaggactcactaaactgctcctgcctcgcactgcagacttctggtcaagaagagcaagtcaaccaaagactaaatctcaatagaggagaggtctcggcaacagagaagacaaatttgccatttgggaggcccagggtgatacagaagaacaaagaccactgtctgctttaccacagggaatacgtcagtgggtttgggaaagctatgaagatgcccatgtggagttcatacactgttcccaagccgggagacacatcatctcttcctcccacagttccagactgtctgcgggctgatgtcagggttgatccttcggagagccaaaaatgttccttctatttagcagaccagaatatcgaccatggcttcctctatcctcctgcaatcaaaggaaataatgagagtcaatatgatgctttaattacaagtaatttggtcccaatgtataaagaattcaaaaaaatgtgggactacttccataaagttctccttataaaatacgctatagaaagaaatggagtgaatgtggttagtggacccatatttgattacaattatgatggccattttgatgcccccgatgaaatcacaaactatgtagctggcaccgatgttcctgtcccgacacactactttgtggtactgacaagctgtaaaaacaaaacccacacacccgacagctgccctgggtggctggatgtcctgccctttgtcgtccctcaccggcccaccaacgtggaaagctgtcctgaaaacaaagcagaagacctttgggttgaagagagatttaaagcacacatcgcccgggtccgtgatgtggagctcctcactggccttgacttttatcaggaaaaaacacagcccgtctctgaaattttgcagctgaagacatatttgcccacattcgaaaccattatttgaatagatgtgtaaagccatttgacaaaatggaaacattttctgtcaagaaattataaaataaaattttctatttttctttaaaaaaaaaaaaaaaaa

SEQ ID NO: 129 - DNA, 2825 bp, Rattus norvegicus
  Genbank Accession No. NM_019371
ggatccaggttttcaagtttgttaggggatttaatgcaaatcaatatgcaaacagagagcattgtaaaaaaaaaaatccagtcctttctccggtcacacacaggttagctaatgtggagctcgcccagatgctctgcagcaccagctcaaggggaagggccaggaggagggcagtcccgggggcgggaccatgacgttgaggtcaaggcggggcttcctctcgttcctccccgggctgcggccgccgcggcggtggctccgcatctccaaaaggggccctccgacttctcactgggccagtccggcgctgggtggcagaactctacactactcctgccggtctcagagcgggactcccttctcttcagagtttcaagcaactttccccgcctttgcagctaaagtggctcggggaccgtggctgccgcaggtggtagagcccccggcccggctctctgcatctccgctgtgcgttcgctctgggcaagccctcggtgcgtgcaccctgggggtcccccgcctcggctctgtgagcgagatgcctctgggacacatcatgaggctggatctggagaagatcgccctggagtacatcgtgccctgtctgcacgaggtcggtttctgctacctggacaacttcctaggcgaggtggtgggcgactgcgtactggagcgagtcaagcagctgcattacaacggggccctgcgtgacggccagctggcggggccccgcgccggcgtctccaagcggcacctgcgaggcgaccagatcacgtggatcgggggcaacgaggagggctgcgaggccatcaacttcctcctgtccctcatcgacaggctggtcctgtactgcgggagccgcctgggcaaatactatgtcaaggagcggtccaaggcgatggtggcttgctatccaggaaatggaacaggttatgttcgtcatgtggacaaccccaatggtgatggccgctgtatcacctgtatctactacctgaataagaattgggacgccaagttacatggaggggtcctgcggatatttccagaaggaaaatcatttgtagcagacgtggagcccatttttgatagactcctgttctcctggtcagaccgcaggaatccacatgaagttcagccctcctatgccaccaggtacgccatgactgtctggtacttcgatgctgaagaaagggcagaagccaaaaagaaattcaggaatctaactagaaaaactgaatctgctcttgctaaagactgacggtggtgtgaagtccgctgggcgcattcgtttagtgacagttcctgaaatgttaagtgtcaagatccaaagactctgtccaatcccctgcctaccgcctgcatcgtttggctccctaccttgtttgtggtacttcgtgttttcttgctgggaatgcgttgccctccagacactctctttgccggatgaactcatttgctaactccagaaacacctgcagacatcctagctggccagcggtttaacggatagatctgggaatggatagatatgggaatgcagctgttcagcccaggattgcctcgtgttcgcactttatgcatacttcctggtctgataggaggaggtttgcgaagaaataaactggtgacagatgccacaaagaggcacccttgaaaccctaacagcaagaaagagaaagatctgaactatttccagatgttgttaacccgagactggacgattacggacaacctgatgacattatcgcctctagaaagggctgctgtcatagcgatcgatttataagtgtcccacggtggatgctcctttttcctggtcctacaacctgttctttttgaaggtcattgctaaattgatgctctcttgtcgaagacgaccccagcctgtatgctccatttttacttcttacttggggatcctaattatccagagaataaaactcaccaggtagtttgggttgttttttctggtactgaaaatttgaagttaaatgagagggacaggaagcgtcctggtaatttagcttctgctaactctgtgggaagagcaaagcctagcggtatgcgataaccatgcatacggtgagcagttcgagagggagatgtggttggaagtgcagacagccccctttcatcatgttccctttagctgttcttcgttcatggctaagaacagcatgttgtactcttaaaagatatggaaataaaaagacctcaaagctatcgagttctcccacattgtctgctctgccagcctcgctttagccgtcttgatccttgagagcaactggttggaagtgcatccagtggtgtggaatttcctagaactgtgggaggtttctcctgcaggatgcaggtgccgcttcccccagaactctgtacgaaacacccattttacggaagttagccatcctagttttcgctgctacttccccatctttcgaacctctttaatttccttgttagaatcccacaagcagcacagacccgagagtgttttatttcatcgtgttcagccatgcagactttccaagcaaagaagttgatacttctttcttctttcgggaaagtgtccaggaagaactgtcattcctccccccatggctctgttttgttttatttcccaccttctaacttacaacgtcatttccttatttattatgtttattgtcttgtagcctatgatgtctagagtgttaaacacaacgaaggcagggatttgtacgtttttgatccatgcagcatgttcccagcacctaagctaacatacagtaagcaacggcttaccaaacacatgttcaataaactcagtctcctctgtaaaa

SEQ ID NO: 130 - DNA, 581 bp, Rattus norvegicus
  Genbank Accession No. NM_019383
ttctgctggagacaggctccgccgggggtcggtgaagtatccaagatggctgggcgcaaacttgctctaaaaaccatcgattgggtatcttttgtggagatcatgccccaaaaccagaaggcaattggaaacgctctgaagtcctggaatgagaccttccacaccaggttggctagtctgtctgagaaaccaccagcgattgactgggcttactacagggccaatgtggacaagcctggcttggtggatgattttaaaaacaagtataatgctctgaagatccctgtgcctgaggataaatacacagccctagtggacgccgaggagaaggaggatgtgaagaactgtgcccagttcgtgactggatctcaggctagggtccgggaatatgagaagcagctggagaaaataaagaacatgattccctttgaccagatgacgattgatgacttgaatgaggtcttccctgaaaccaagctggacaagaggaagtacccatactggccccatcagcccatcgagaacctgtgaagcagcccaggagggagccctggctgacttgaataaacatttacatagtc

SEQ ID NO: 131 - DNA, 3393 bp, Rattus norvegicus
  Genbank Accession No. NM_019386
ctggcccatggcagaggagctgaacctggagaggtgcgacttggagatacaggccaatggccgtgatcaccacacggccgacctgtgccaacagaaactggtgctgcggcgaggccagcgcttccggctgacactgtacttcgagggccgtggctatgaggccagcgtggacagacttacatttggtgccgtgaccggcccagatcccagtgaagaggcagggaccaaggcccgattctcactgtctgacgatgtggaggagggatcctggtcagcctctgtgctggaccaacaggacaatgtcctctcgctgcagctctgcaccccagccaatgctcctgttggccagtaccgcctcagcctggagacttctactggctaccaaggctccagcttcatgctgggtcacttcatcctgctcttcaatgcctggtgcccagcggatgacgtgtacctagattcagaggcggagcgccgggaatacgtcctcacacagcagggcttcatctaccagggctctgtcaagttcatcaagagtgtgccttggaactttgggcagtttgaggatgggatcctggatgcctgcctgatgctcttggatgtgaaccccaagttcctgaaggaccgtagccgggactgctcacgacgcagcagtcccatctatgtgggccgcgtggtgagcggcatggtcaactgcaatgatgaccagggtgtgcttctgggtcgctgggacaacaattatggggacggtatcagtcccatggcctggatcggcagcgtggacattctgcggcgctggaaggaacacggctgtcagcaagtgaagtatggccagtgctgggtgtttgcggcggtggcctgcacagtgctgcggtgccttggcatccctaccagagtggtgaccaactacaactccgcccacgaccagaacagcaacctgctcatcgagtacttccgaaacgagtacggggagctggagagcaacaagagcgagatgatctggaatttccactgctgggtggagtcctggatgaccaggccagacctacagccaggctatgaggggtggcaggccattgaccccacaccgcaggagaagagcgaaggaacatactgttgtggcccagtctcagtgcgggccatcaaggagggtgacctgagcaccaagtatgatgcgtccttcgtgtttgccgaggtcaacgctgatgtggtggactggatccggcagtcagatgggtctgtgctcaaatccatcaacaattccctggtcgtggggcagaaaatcagcactaagagcgtgggccgtgatgaccgggaggacatcacctatacctacaagtacccagaggggtccccagaggaaagggaagtcttcaccagagccaaccacctgaacaaactggcagagaaagaggagacaggggtggccatgcggatccgagtgggggatggtatgagcttgggcaatgactttgacgtgtttgcccacatcggcaacgacacctcggagagccgtgagtgccgcctcctgctctgtgcccgcactgtcagctacaacggcgtgctggggcccgagtgtggcactgaggacatcaacctgaccctggatccctactctgagaacagcatcccccttcgcatcctctacgagaagtacagcggttgcctgaccgagtcaaacctcatcaaggtgcggggtctcctcgtcgagccagctgctaacagctacctgctggctgagagagatctctacctggagaatcctgaaatcaagatccggatcctgggggagcccaagcagaaccgcaaactggtggctgaggtgtccctgaagaacccactttctgattccctgtatgactgtgtcttcactgtggagggggctggcctgaccaaggaacagaagtctgtggaggtctcagaccctgtgccagcaggagatgcggtcaaggtgcgggttgacctgttcccgactgatattggcctccacaagttggtggtgaacttccagtgtgacaagctgaagtcggtcaagggttaccggaatatcatcatcggcccggcctaagggacccccttcacccagactcagcccatcacctgccagccctcaactcaacctggttttatccccagataatgagcgacgactgcaccccattcgggctgacatgactgcctcggggcttttcagaagacaatgtacttctggcccatcctgttcctctggatctatttccccatctgtccccttagctgtgaggaatgttctgtgctgatacagccagtaccctggcgagagtaagaggagagccattattaccagcactctgtatctgtgtattgtttgaactgtctctagagcctcagagtgagtgcaaacggatggtgagcccgttggctcaacgaaggaactcagctgcctctccaacagtttcccacccgcctcccctctgaaggggaactgtatgtgctaggcaccttgagttctaacagggacagcaacctgttggatgtccatgagaaacttcagggtgggaactgaggctgcccgtgctgtactgtgtcagtaggacaggccagccatcacttgcagggccagtgggtgagcttagaaacaccacctgtgtcatctggcttggaatttagcactctatctgtgacaccagctttgacccgagggtgtcagagaggccatctcttccggccttctccggaaggacacggttagggtgaggaggtgagggaggagcggggaggcttgagagctgggagtcagagcctgggtttaagccccaaggagggctacactctatcctcctcttctgggcttgatcctcctatatcagagcagagattgacaagccctcctccagggtttcctggtcccatacttctaaagccttccatccaaggctagggcacttctggggtgtcctgcttctcacctgtgcctgggctcctcagatacagttccaggacaacccacaagctactcacatagtgcctagactagatttcacagaaggagccttaaatgtccatgctggtccctacccaccagggccacccctccatgcccctcctccttggtaagcacacctagacacagcatttgtctctagaaaagcacagaagcctatgggtcatcatccgagttagcctactcctacccctctgtggctgggccctcaagctggaaggctgcagtgtggaggggtttctagggggtgaggtcagagactctgggatcccctgaaatcccagagaagaacttgggaagaatcacactgctgcatttaacacgttccgctttatgcagagaatcgcaccgtgagtcttgtatctgccctgtccccacacggttccatttcttttgatctgtgcaagctt

SEQ ID NO: 132 - DNA, 1395 bp, Rattus norvegicus
  Genbank Accession No. NM_019905
aggctctctgcaataggtgcccggcccagcttttttttcaaaatgtctactgtccacgaaatcctgtgcaagctcagcttggagggtgatcattctacacccccaagtgcctatgggtcggtcaaaccctacaccaacttcgacgctgagagggatgctttgaacattgaaacagcaatcaagaccaaaggcgtggacgaggtcaccattgtcaacattctgactaaccgcagcaatgcacagaggcaggacattgccttcgcctaccagaggaggaccaaaaaggaactgccatcggcgatgaagtcggccttgtctggtcacctggagaccgtgatgttaggcctgttgaagacacctgctcagtacgatgcctctgagctcaaagcctccatgaagggcctggggactgatgaggactccctcatcgagatcatctgctcaagaaccaaccaggagctgcaggagattaaccgagtgtataaggaaatgtacaagaccgatctggagaaggacatcatctctgacacatctggagaattccgaaagctgttggtcgcccttgcaaagggtaaacgggcagaggatggttctgttattgactacgagctgattgaccaggatgcccgggagctctatgatgctggggtgaagaggaaaggaaccgatgtccccaagtggatcagcatcatgactgagcgcagtgtgtgccacctccagaaagtgttcgaaaggtacaagagctacagtccttatgacatgctggagagcatcaggaaagaggtcaaaggagacctggagaacgccttcctgaacctggttcagtgcattcagaacaagcccctgtactttgctgaccggctgtatgactccatgaagggcaaggggactcgagacaaggtcctgattagaatcatggtctctcgcagtgaagtggacatgttgaaaatcagatctgaattcaagaggaaatatggcaaatccctgtactacttcatccagcaagacactaagggtgactaccagaaggcgctgctgtacctgtgtggtggggacgactgaagggcttggcatggtggattgcccagaagtggccctacctgtgccccaacctaatgttctagagaatcagcctgccactaatggacccctgaactcctccctgtgaagatgacgacagagctgccgacccatcccccatcttagctgcctttgcctggctttcccctcattctctcctttatgccaaagaaatgaacattccagggagttggacgtaccgtctgtgacatgagacacttcctcatatgtgtcgtgaataaaccatttttactttaaaaaaaaaaaaaaaaaaaaaaaaaaaaaaaaaaaaaaaaaaaaaaaaaaaaaaaaaaa

SEQ ID NO: 133 - DNA, 3504 bp, Rattus norvegicus
  Genbank Accession No. NM_020075
ctctgcttttctctttcagagctgttgcgcagccattggtacctgtattggggaaacatagcatacaagcaagaagcttacagcctcagtggcgaaaaatttttcatgtcagagaccgagaactcttgcagtcgtttatgtcatcccttcttctccagacagaagataccaaaaagttgcaatcaaagatctgttcatcttattgataaagtcactaataagccaaaatgtctgtcaacgtcaaccgcagcgtgtcagaccagttctatcgctacaagatgccccgtttgattgctaaggttgagggcaaaggaaatggaatcaagacagttatagtcaacatggttgacgttgcaaaggcgcttaatcggcctccaacgtatcccaccaaatattttggttgtgagctgggagcacagacccagtttgatgttaagaatgaccgttacattgtcaatggatctcatgaggcgaataagctgcaagacatgttggatggattcattaaaaaatttgttctctgtcctgagtgtgagaatcctgaaacagatctgcatgtcaatccaaagaagcaaacaataggtaattcttgtaaagcctgtgggtaccgaggcatgcttgacacacatcataaactctgtacattcattctcaaaaacccacctgagaatagtgacattggtacaggaaagaaagagaaagaaaagaaaaatagaaagggcaaggacaaggaaaatggctctgtatccaccagtgagacaccaccacctccaccaccaaatgaaattagtcctccacatgctgtggaagaagaggaagatgatgattggggggaggatacaactgaggaagctcaaaggcgcagaatggatgaaatcagtgaccatgcaaaaggtctgacacttagcgatgatttggaaagaactgtagaagagcgtgttaacatcctgtttgattttgttaagaaaaagaaagaagagggcattattgattcatctgataaagacattgtggctgaggcagaaagactggatgtaaaagccatgggccctctcgttttgacagaagttctctttgatgagaagataagagagcaaatcaagaaatacaggcgccattttttaagattttgtcataacaacaaaaaggcccagcggtaccttcttcatggtttggaatgtgtggtagcaatgcatcaagctcagttgatctccaagattccacatatcttgaaggagatgtatgatgcagaccttttagaggaagaggtcattatcagctggtcagaaaaggcctctaagaaatatgtctcaaaagaacttgccaaagagattcgtgtcaaagcagagccatttattaaatggttgaaggaagcggaggaggaatcttctggtggtgaggaagaagacgaagatgaaaatattgaggtggtatattcgaagactgccagtgtaccaaaagttgaaactgtgaagtctgacaacaaggatgacgacattgatattgatgccatttaaaaggatggatgcaacttagcttaacagtgtaatgctgcaaatttttctccattatcagccagaagtgcaacatgtatgtgcaagagctaaagtggcttaacatcatgctacacttgatactaaaaagctattactgtgagtggtctataattaagcccaatgagacatctagggagtccatacatatcagtgagcagttgtagtttgcttatttatagcatgtttctttcggaaaaactagtggtggacacatttggatcacatttatacagttataaaaaataaagatttgattttggtcattcttcagactttgggctatgaatggcttatgctgaagtaattggctacttttaggatgttacaccatttaataacttagacttcttaagtttggtagattgttaggtactgaagacttgaagaatgcaaacaattataatgaccttactcagccattaagaaatgaagtattttgaaagttgtgtctccagtccattgagattggcaactgacaattcttgtcattctaaggaaatttgatgatttaatgacagtgtgacatcctcatgagaagtaaaaatgacctgtgtgtcctatggtttaagagcaaattttgaaacttggagttgtggtttttcagtttgtgtacactcaccccaaattgtagtctattgagtcatgtgcattgcacgttggataagccagggaaatgacaaataagtattttgtgtgtatttagtggttgctttgtactgagagaaaagctttgaggtgtgattaaatcgtaaactctgattctatttgggagaaacaggaaaaaggtgcacttaatctaaaacagcataagttttcaacttttacccttaaattataatttcaagatgtttagacatactgtatcttgtgtttgatgtgttccccctccctaatattatggtttattctttaatgccttttaatttggatataatagcttgtactttagattttggttgctatcttgccaaaataagtgttactgtttttcaagcttgatccccttccctgattgtcttatttaaagagaaagttaaactcatacttctgagtcagagcctgtattttggttaagacttgggatattttttacttcacattgaatatagctggatacctgagaagtctggtgatggcactgggtgggtgcagctagctaaggcctgaccagcccattcagagccttggacttcagacacaaaagtgagtttcttacccacttgctggtgtaaactctatctggggtcctgactatatttgaatacttgtcttcaatattaaaaaacatagcacatttttctttctacaaaagtacattctggagttaagaacccatgtggttgatttgtgtgtggcgtgctagctcatacattatttggatcttattctttgtgtcatccatctcacagattataagactttgattaatgtaaaaagtatgcgttaaaatcataccaaacatttggtaaaattaaaaccttgatgggaggctgggcgtggaacaggagccatatacctggaatggtaacaggggaatgtgctatgtcacaccaaagaagtgggacttggaaagtcacttgtctcctgggtttcagactctttgttgcatgggcagcccatccatatgtcattactttttgagattctcaagtagatcagcacatttcggcctcaggttggcaagattttgtcttagagctgttgctttaaagggaaatggtcaggtcttagacacttaggaaggtcttgggcttctgttcattctggtgccaaaccagtgggattcaaatttcacacaatctgggtttttattcatggaggttaacctggtaagagtaatccttcatggctctattgaggtgtcttaaaaagtttcctgtttcaaacagctacattacttgattaaaacaatgttataaaattaaatttccccctcctttcatattaa

SEQ ID NO: 134 - DNA, 2572 bp, Rattus norvegicus
  Genbank Accession No. NM_021699
ggcacgagcgttccctcccctgagataccggcgccatgtccagcgctcggacccccctacccacgctgaacgaaagggacacggagcagcccaccttgggacaccttgattccaagcccagcagtaagtccaacatgctgcggggccgcaactcagccacctctgctgacgagcagccccatattggcaactacagactccttaagaccattggcaagggtaactttgccaaagtgaagttggcccggcacatcctgacggggaaagaggtagctgtgaagatcattgacaagactcagctgaattcctccagcctgcagaaactcttccgagaagtaagaataatgaaggttttgaatcatcccaacatagttaagttatttgaagtgatcgagactgagaagacgctctaccttgtcatggagtatgccagtggcggagaggtatttgattacctagtggcccatggcaggatgaaagaaaaagaagctcgagccaaatttcgccagatagtgtctgctgtgcagtactgtcaccagaagtttattgttcatagagatctaaaggcagaaaacctgctcctggatgctgatatgaacatcaagattgcagactttggctttagtaacgaattcacctttgggaacaagctggatactttctgtggtagtcctccttatgctgccccagaactcttccagggcaaaaagtatgacggtcctgaagtggatgtctggagcctgggcgtcatcctctatacactggtcagcgggtccctgccttttgatggacagaacctcaaggagctacgggaaagggtactgagggggaaataccgtattccattctacatgtccacggactgtgaaaatctgcttaagaaatttctcatacttaatcctagtaagagaggcactttggagcaaattatgaaagatcggtggatgaatgtgggccatgaggatgacgagctaaagccttacgtggagccactccctgactacaaggatccccggcggacagagttgatggtgtcaatgggttacacacgggaagagatccaggactcgctggtaggccagaggtacaacgaagtgatggctacctatctgctccttggctacaagagctctgagctggaaggtgacaccatcactttaaagccccggccttcagctgatctaaccaacagcagtgccccatctccatcccacaaagttcagcgcagcgtctctgccaaccccaagcagcggcgctccagtgaccaggccgtccccgccattcccacctcgaattcctactctaagaagactcagagtaacaacgcagaaaataagcggcctgaggaagagacagggcggaaagccagcagcaccgccaaagtgcctgccagccctctgcctggcctggacaggaagaagaccactcctaccccctccacaaacagcgtcctctccaccagcacaaacagaagcaggaactccccacttttggacagggccagccttggccaggcctccatccagaatggtaaagacagcacagccccccagcgtgtccctgtcgcctccccctccgcccacaacatcagcagcagtagtggagccccagaccgaactaatttcccacggggtgtgtccagtcgaagcaccttccatgctgggcagctccgacaggtgcgggaccagcagaatctgcccttcggtgtgaccccagcctcaccctctggccatagccagggccggcggggggcctctggcagcatcttcagcaagttcacctccaagtttgtccgcaggaacctgaatgaacctgaaagcaaagaccgagtggagacgctcagacctcacgtggtaggcggtggaggcactgacaaggaaaaggaagaatttcgggaggccaagcctcgttccctgcgcttcacttggagcatgaagaccacgagctctatggagcccaatgagatgatgcgggagatccgcaaggtgctggacgccaacagctgccaaagcgagctgcacgagcgatacatgctgctgtgcgtgcatggcacacccggccacgagaactttgtgcagtgggagatggaggtgtgcaaactgccccggctgtctctcaacggtgttcggtttaagcggatatcgggcacttccatggccttcaaaaacattgcctccaaaatagccaatgagctgaagctttaacaggctgtcaggaggggcggcagaggcccaccagtggacttggctgcttgggccaaacctgcatcccctgggagaaaaactgcaggatgaattggtgtgtctcccctgctggcacttgtccccttccaggcccttctcagttttttcttccatgtttgtgggggatgggaagtggtggttcctcctcccacattcacccctgcccagaagtctctcccttcccctctacccccgtacaggaggcaaaggaaggggaaggggttgggggggcagggctccccctcggtactgcggttgcacagagtatttcgcctaaaccaagaaaatttttattaccaaaaagaaaaaaagaaaaaaaaactcgtgcc

SEQ ID NO: 135 - DNA, 1591 bp, Rattus norvegicus
  Genbank Accession No. NM_021744
ggaaagaaactgaagcctttctcggagcctgtctgggctgctcccactctcagaatctaccgaccatgaagcttatgctcggcttgttgctgttgcctttgacactggtgcatgcctctcccgccacaccagaaccctgtgagctggaccaggacgaggaaagtgtccgctgctactgcaacttctcagatccgcagcccaattggtccagcgcttttctatgcgcgggggcggaagacgtggagttctacggcggcggtcgcagcctggagtaccttctaaagcgtgtggacacggaagcaaatctggggcagtacactgatattatcaggtctctgcccttgaagaggcttactgtgcggtccgcgcgggttcctactcagattctattcggaaccctgcgtgtgctcggatattctggcctccgggaactgactcttgaaaacctcgaggtaaccggcaccgcgctttcgccgcttctggatgccaccggacccgatctcaacaccttgagcctccgcaacgtgtcgtgggcaacaacggatacctggctcgcagaactgcagcagtggctaaagcctggactcaaggtactaagtattgcccaagcacactcactcaacttttcttgcaaacaggtcggcgtcttccctgcccttgccaccttagatctgtctgacaaccctgagttgggcgagaaaggactgatctcggccctctgtccgcacaaattcccgaccctccaagttttagcgctgcgcaacgcggggatggagacgaccagcggcgtgtgctctgcgctggccgcagcaagagtgccactgcaggcactggatctcagtcacaattcactgcgggatactgctggcactccgagctgtgactggcccagtcagctaaactcgctcaatctatctttcactgggctggagcacgtacctaaagggctgccagccaagcttagcgtgcttgatctcagttacaacaggctggataggaaacctaggccagaggagctgcctgaagtggggagcctgtcacttacaggaaatccctttttgcactctgaatcccagtcggaggcgtataactctggcgtagtcatagccacagctctttcacccggatcagcgggcttgtcaggaactttggctttgctcctaggacatcgcctctttgtttaaggaacgtttgcatcttcctggtttctgagggtcctggtcaacaaatcctctgctttaaatttattaaaatcttaatccacaatgtaaggaaggacaatcaagatggctcaatgggtaaaagccaccaagcttgactcctgattttgatcctcgggatccacaccaaaggaaagaactctctcctgaaagttgtccatcggtgctcacaaataaatatatttttttttccggagctgaggaccgaacccagggccttgcgctcactaggcaagcgctctaccactgagctaaatccccaaccccacaaataaatatttttaaaaaaaaaaaaaaaaaaaaaaaaaaaaaaaaaaaaaaaaaaaaaaaaaaaaaaaaaaaaaaaaaaaaaaaaaaaaaaaaaaaaaaaa

SEQ ID NO: 136 - DNA, 1980 bp, Rattus norvegicus
  Genbank Accession No. NM_021754
ggcacgagggaacgtctaggcaacgtggtctccccgcccgcgggtaggcaaaggcgtttgcgcttcccagcgtctgaggcctagggagccttcagtagccgaaagttagtcttttgcagtggagtaagggctcgcggttagccgcgtagcgcccggatctggcctcaccatgttggtcctatttgaaacgtccgttggctacgccatctttaaggttctgaatgagaagaaacttcaagaggttgatagtttgtggaaagaatttgaaactccagagaaagcaaataaaatagtaaagctaaaacattttgagaaatttcaggatacagcagaagcattagcagcgttcacagctctgatggaaggcaagatcaataagcagctgaaaaaagttttgaagaaaatagtcaaagaagcccatgaacctctggctgtagctgatgctaagctaggaggggtcataaaggaaaaattgaatctcagctgtatccatagtcctgttgttaatgaacttatgagaggaatacgatcacaaatggatggcttgattcctggggtagaaccacgggagatggcagccatgtgtcttggactagcccacagcctatctcgatacagattgaaattcagtgctgataaagtagacacaatgatcgttcaggcaatttccttgttagatgacttggataaagaactaaacaactacattatgcggtgtagggaatggtatggctggcattttcctgagttagggaaaattatttcagataatttgacatactgcaagtgtttacagaaagttggagacaggaagaactatgcatctgccactctttctgaattcctgtcagaggaagtagaagctgaagtgaaagcagctgcagagatctctatgggaacagaggtttctgaagaagatatttgcaacattctacatctgtgtactcaggtcattgaaatttctgaatatagaactcagctgtatgaatatctgcaaaaccgaatgatggccattgcacccaatgttacagtcatggttggggagttggttggagcgcggcttattgctcatgcaggttctcttttgaatttggccaagcatgcagcttctacagttcagattctgggagcagaaaaggcacttttcagggccctcaaatctagacgagacacacctaaatatgggcttatttatcatgcttctcttgtaggccagacgagtcccaaacacaaaggaaagatttcacgaatgctggcggccaaaactgtgttggctatcagatacgacgcctttggtgaagattccagctctgcaatgggagctgagaacagagccaaattagaggccagattgaggattttggaggacagagggataagaaaaataagtggaacgggaaaggcattagcaaaagcagaaaagtatgaacacaaaagtgaagtgaagacttacgatccctctggtgactccacacttccaacttgttctaaaaaacgcaaaatagaagaggttgataaagaggatgaaattactgaaaagaaagcaaaaaaagccaagattaaaattaaagctgaagtagaggaggagatggaggaggcggaggaagaacaggtagtagaagaggagccgactgtaaagaagaaaaagaagaaggataaaaagaaacacataaaggaagagccactttccgaggaggagccatgcaccagcacagcagttcctagtccagagaaaaagaagaaaaagaaaaaaaagaaagatgctgaagactaatgtaaaggaaccgtaatcctgtcacctgaacacatcatgcttaagattcagttgggagcatatcagacgctctaacataatcaagggaggttgattagctttagcttttcaaacctttttgtgtcttgacatcaactgttaaccttagagtctttgatacacaaataaaaatattttctttgtattataaaaaaaaaaaaaaaaaa

SEQ ID NO: 137 - DNA, 940 bp, Rattus norvegicus
  Genbank Accession No. NM_021909
cccacgcggtactttgacacttcagtttggagaccttgggctcggacgcaaataccagagggtccttgaagccagacctgctctgaggaggctgcaaggggagggggtgccaaggggctatacctcacctttgcctccacttgcccaacagatgtcaccgcccagtcagctgtgtctcctcaccattgtcgccctgattttgcctagtgaagggcagacaccagaaaaacccagatccagttttacagggcaccagagttctgtgactactcatgtcccagttccagatcaaaccagcccaggagtccagaccactcctcccatttggaccagtgaagctggcgaagccacaggaagccagacagcagccaaaaccaagacccagcaactgaccgaaatggccactgcgaatccagtgacagatccagggccacttacaagcagcgagaaaggtaccccgtcaccctcctcaaataaatctcccagcccaaccaaaggttacatgcctccatcgtacattgagaatccactggatcccaatgagaacagccccttctactacgacaataccaccctccggaaacgggggctgctggtggcggcagtgctgttcattactggaattatcatcctcactagtgggaagtgtagacagttctctcagttatgcctgaatcgccacaggtgagtgggagccagcaccctgatgggcaccccaactggagccgccataccataccagttcaccacccctgcctccctccctctgctccaagagccaacagagtggtcaacataaatggatcctcaaaggaagaggccaccggagggagccaggcctaaggctaaatggtcttcccaccctgaggagagaggtctccccaggcactgctgtgatcctgcctatcctgttcagataaatccacatggtctctcttca

SEQ ID NO: 138 - DNA, 3692 bp, Rattus norvegicus
  Genbank Accession No. NM_022179
gtcgtcttatttgggagctgagacttgaggaaggtgataacttctgaatccccccaggtagtcaataccattgtggaaacatggccgccattgagccttctggtctgcacccgggagaaagagactcaagctgcccccaggagggcattccaaggccctcaggtagcttagaactggcacaggaatacttgcaacaattcaaggtgaccatgacacagctgcagcagatccaagccagtcttctgtgttccatggagcaggcgctgaagggacaggacagtcccgctccttctgtccggatgttgcccacatacgtgaggtccacaccacatggcaccgagcaaggagacttcctggtgctggagctgggggccacaggagcctcactacgtgtgttgtgggtaacactgacgggcaccaaggaacacagcgtggagaccaggagccaggagtttgtgatccctcaagaggtgatcctaggtgctggccagcagctctttgactttgctgcccgctgcctctctgaattcctggatgcataccccgtggagaatcagggtctgaagcttgggtttaatttctcttttccttgtcaccagacaggcttggacaagagcaccctcatttcctggacaaaaggttttaggtgcagtggtgtggaaggccaggatgtggtccagttgctaagggatgccattcagaggcaggggacctacaatattgatgtggtagccatggtgaatgacacagtgggtaccatgatgggctgtgagctgggcaccaggccatgtgaagtcgggcttattgtagacactggtaccaatgcctgttatatggaggaagcgaggcacgtggcagctctggatgaggaccgcggccgtacctgtgtcagcatcgagtggggctccttctatgacgaagaggccctagggccagtactgaccaccttcgacgatgccctggaccacgagtccctggttcctggtgctcagaggtttgagaagatgattggtggcctttacttgggtgagctggtaaggctggtgctggtccacttgtcccagcatggggtcctctttggtggctgcgcctctcctgcgttgctgagtcaaaacagcatcctcctggaacatgtggccaaaatggaggaccctgccactgggatagcccacgtccacacagtcctgcagggcttgggtctgagccctcaggcctcagatgctgagctcgtgcagcgcgtgtgcatggctgtgtgcacgcgagctgcccagctctgtgcctctgccctggctgcagtcctatcccgcctccagcacagcagggagcagcagacactgcacgtggccgtggccactggagggcgagtgttcgaatggcaccccaggttcctctgcatcctaaaggagacggtaatgctcttggccccagagtgtgatgtctccttcatcccctctgtggatggtggtggccggggtgtggcaatggtgactgctgtggcagcccgcctggctacccacaggcgcatcctggaagagaccctggcaccatttcagctgagcttggagcagctgacagcggtgcaggcacaaatgcgggaagccatgatcagggggcttcaaggagagagctcctccctccgcatgctgcccacttacgtccgagcaacgcccgatggcagcgaacgaggtgacttcctggctttggacctagggggcaccaacttccgtgtcctgttggtacgcgtggccgagggcagtgttcagatcaccaaccaggtctactctattcctgagtatgtagcccagggctctggacagaagctctttgatcatattgtggactgcatcgtggacttccagaagaggcaaggccttagcggacagagcctacccctgggtttcaccttctcttttccttgcaagcagcttggcctggaccagggcatcctcctcaactggactaaggggttcaatgcatcaggctgcgagggccaagatgttgtgtatttattacgggaagccattaggcgcagacaggcagtggagctgaatgtggttgccattgtcaatgacacggtggggaccatgatgtcctgtggctatgatgatccctgttgtgagatgggcctcattgtcggaaccggtaccaacgcctgctatatggaagaactccggaatgtggcgagtgtgcccggggactcaggccacatgtgtatcaacatggagtggggtgcctttggggatgacggctcactgagcatgctcggcacctgctttgatgctagcgtggaccaggcatccatcaacccaggcaaacagaggtttgagaaaatgatcagcggaatgtacctgggggagatcgtccgccatatcctcctgcacttaaccagtcttggagttctcttccggggccagaagacgcaatgccttcagaccagggacatctttaagaccaagtttctctccgagattgagagcgacagcctggccctgcgtcaggtccgagccatcctggaggacctggggctgactctgacgtctgatgatgccttgatggtcctagaggtgtgccaggctgtgtcccgcagggccgcccaactctgcggggcaggtgtggctgcagtggtggaaaagatacgggagaaccggggcctgcaggagctgacagtgtctgtgggagtggatgggacgctctacaagctacatccccacttctccaggctggtgtcagtgacagttcggaagctagcccctcagtgcacagtcacctttttgcaatcggaggatgggtctgggaaaggggcagcgttggtcactcgtgtcgcttgccgcctgacccagatggcctgcgtttgaggaaaatctccaaagagcaattgggatctccctggactaaggattcagcccacacggaccctctggcgggcccagccacccacaactcccaaagaaacccacgggtggtgccctcataactgtccgcccacacccaatggctttctgagagaagcaccactctggttagcaaggaattccccgaagatggcggaggggcaggttctagtattggatggccggggccatcttctgggccgcctggccgattgtggccaactgctgggcaggtagccgaaaggtggtggttgtacgctgtgagggcatcaacatttctggaaatttctacagaaacaagttaaagtatctggccttctccgaaagcggatgaacaccaacccgtctcgaggcccctaccacttccgagccccaagccgcattttttggcgcactgtgcgaggcatgctgccgcacaagaccaaaagaggccaggctgccctggaacgcctcaaggtgttggatgggatccctccaccctatgacaagaaaaagcggatggtggtccctgctgccctcaaggttgtgcggctgaagctaccagaaagtttgcttacctggggcgtctggctcatgaggtcgggtggaagtaccaggcagtgacagctactctggaggagaaacggaaggaaaaggcaaagatccattaccggaagaagaagcagctcttgaggctaaggaaacaggcagaaaagaatgtggagaagaaaatctgcaagttcacagaggtcctcaagaccaatggactcttggtgtgaaccaataaagactgtttgtgcctcaaaaaaaaaaaaaaaaaaa

SEQ ID NO: 139 - DNA, 609 bp, Rattus norvegicus
  Genbank Accession No. NM_022196
atgaaggtcttggccgcagggattgtgcccctactgctcattctgcactggaaacacggggcagggagcccccttcccatcacccctgtaaatgccacctgcgccatacgccacccgtgtcacggcaacctcatgaaccagatcaagagtcaactggctcaactcaacggcagtgccaatgccctctttatttcctattacacagctcaaggggaaccatttcccaacaacgtggataagctatgtgcgccaaacatgacggatttcccacctttccatgccaatgggacagagaagaccaagttggtcgagctgtatcggatggtcacgtacctgggagcctccctgaccaacatcacctgggatcagaaaaacctcaaccccactgccgtgagcctccagatcaaactcaatgcgactacagacgtcatgagggggctccttagcagcgtgctttgccgtctgtgcaacaagtaccatgtgggccatgtggatgtgccctgtgtccccgacaactctagcaaagaagccttccaaaggaagaagttgggctgccagctcctggggacatacaagcaagtcataagtgtgttggcccaggccttctag

SEQ ID NO: 140 - DNA, 2175 bp, Rattus norvegicus
  Genbank Accession No. NM_022229
gcagaaatgcttcgactacccacagtccttcgccagatgagaccagtgtctcgggcactggctcctcatctcactcgggcctatgccaaagatgtaaaatttggtgcggatgctcgagccttaatgcttcaaggtgtagaccttttagccgatgctgtagctgttacaatggggccaaagggaagaacagtgattattgaacagagttggggaagtcccaaagtaacaaaagatggggtcactgttgcaaagtcaattgatttaaaggataaatacaaaaatatcggagctaagcttgttcaggatgttgccaataacacaaatgaagaggctggggatggcaccaccactgccactgttctggcacggtctattgccaaggagggctttgagaagatcagcaaaggggctaatccagtggaaatccggagaggtgtgatgttggctgttgatgctgtaattgctgaacttaagaaacaatctaaacctgtgacaacccctgaagaaattgctcaggttgctacaatttctgcaaacggagacaaagacattgggaacatcatttctgatgcaatgaagaaggttggaagaaagggtgtcatcacagtgaaggatggaaaaaccctgaatgatgagctagaaattattgaaggcatgaagtttgatagaggatatatttccccatattttattaacacatcaaaaggtcaaaaatgtgaattccaagatgcctatgttttgttgagtgaaaagaaaatttctagtgttcagtccattgtacctgctcttgaaattgccaatgctcaccggaagcccttggtcataattgctgaagatgttgatggagaagctcttagcacactggttttgaacaggctaaaagttggtcttcaggttgtagcagtcaaagctccagggtttggggacaacaggaagaaccagcttaaagatatggctatcgctactggtggtgcggtgtttggagaagagggtttgaatctaaatcttgaagatgttcaagctcatgatttagggaaagttggagaggtcatcgtcaccaaagatgatgccatgcttttgaaaggaaaaggtgacaaagctcacattgaaaaacgtattcaagaaatcactgagcagctagacatcaccactagtgaatatgagaaggaaaagctgaacgagcgacttgctaaactctcagatggagtagccgtgttgaaggttggagggacaagtgatgttgaagtgaatgagaagaaagacagagttacagatgctctcaatgctacaagagcagctgttgaagaaggcattgttctaggagggggctgtgctctacttcggtgcatcccagccttggattcattaaagcctgctaatgaagatcagaagataggtatagaaattattaaaagagcacttaaaattcctgcaatgacgattgctaagaatgcaggtgttgaaggatctttgatagttgaaaaaattctgcagagttcctcagaggttggctatgatgccatgcttggagattttgtgaacatggtggaaaagggaatcattgatccaacaaaggttgtaagaactgctttactggatgctgctggggtggcccccctgctaactacagccgaagctgtagtgacagaaattcctaaagaagagaaggaccctggaatgggtgcaatgggtggaatgggagggggtatgggaggtggcatgttctaactcctagaatagtgctttgcccttatcaatgaactgtggcaggaagctcaaggcaggttcctcaccaataacttcagagaagtcacctgaagaaaatgactgaagagaaggctggctgatcactgtaaccatcagttactggtttcctttgacaatacataatggtttactgctgtcattgtccatgcctacagataatttattttgtatttttgaataaagacatttgtacattcctgatgctgggtgcaagagccagtgtcctgctttcaacttaaatcactgaggcatctctactgttctgttagcatcaggactgtagcgctgtgtcaccacatgagaagttcagaagcagcctttctgtggagggtgagaatgattgtgtacagagtagagaagtatccaattatgtgacaacctttgtgtaataaaattttgtttaaagtt

SEQ ID NO: 141 - DNA, 4075 bp, Rattus norvegicus
  Genbank Accession No. NM_022251
tcgaggctgacagaggtttggcaaaatctccacctctcccaacccccacatccctgcccgcgttagccgataggctcaagccctgttttatatttaactcactccagttcaggaggggcgggcctggggagacgctgtttatacagagctgggccaacactctcatccgtcctcctccgtcaagtcagcctctcttctgagccttcatcccactgcttggtttccgcattcatcccagagtggccggtgaggacgtgcaggactgggaagagacaccggacaccagacagagaggtgtgggaaagcgaagtcaggctgccaaactaggggacgccttccaattgaaaagggaagtcagctgacgatagttagttaaatttaacatcctttcatgggtagtatctgacttcaggggagaaaaatgaactttgcagaggaagagccctctaagaaatactgcattaaaggcaaacacgtggccatcatctgcgcaacggtggtagcagtgggattaatagtaggactttctgtgggcttgaccaggtcgtgtgagccgggcacaacccccgctccttccaaccctcctccccacaccagcactgccctgcctccccaggatcagaatgtctgccctgacagtgacgatgaaagtggagaatggaaaaacttcaggctgccggacttcatccagccagttcactacgacctggaggtgaaggtcctaatggaggaagacaggtacacgggcatagtgagcatctctgtcaacttgagcaaagacactcgtgacctatggctgcacatcagggaaaccaggatcaccaagctgccggagctaaggaggccctccggggagcaggtaccgattcgacggtgctttgagtacaagaagcaggagtacgtggtgattcaggctgaagaagaccttgcggccaccagcggggacagtgtctatcggctgaccatagagtttgaaggctggttgaacggctcccttgtgggtttttacagaaccacctacacggaggacgggcaaaccaagagcatagcggccactgaccatgaaccaacagatgccaggaagtccttcccttgtttcgatgaacccaacaagaaggcgacttacaacatatccctcattcacccgaaagaatactcagcactttccaatatgccagtagagaaggaagagacactggataacgactggaagaaaaccactttcatgaagtccgtcccgatgagcacttacctggtgtgctttgctgtacatcagttcacctcgatacagagaacatccaggagtggcaaaccactcactgtttacgtccagcccaagcaaaagcaaacagcagagtatgcagcaaacataaccaaagctgtgtttgacttctttgaagactacttcgctatggagtattctcttccgaaactggataaaattgctattccagattttggcaccggcgccatggaaaactggggacttgtcacttaccgagaaacaaacctgctttatgaccccctgctatcggcctcatccaaccagcagagagtagccagcgtggttgcccacgagctcgtgcaccagtggtttggaaatatcgtgaccatggactggtgggacgacttgtggctaaatgaaggatttgcttcgttcttcgagttcttgggagtaaaccacgcagaagcagactggcagatgctcagtcaggtgctgcttgaagacgtgctacctgtgcaggaggatgactccctgatgtcctcacatccggtggttgtcacggtgtctactccagctgaaataacgtctgtgttcgatggaatatcatacagcaagggagcttctatcctgagaatgcttcaagactggataacaccagagaaattccaaaaggggtgtcagatttacttggaaaacttcaagttcaagaacgcgaaaacttccgacttttgggattcactggaaaaggcaagtaatcaaccagtgaaagaagtaatggacacctggactagccagatgggctatcctgtggttactgtgagtggaaagcagaacgtcacccagaaacgctttctgttggactacaaagctgacccttcccagccaccgtcagcacttggttacacatggaatattccaatcaaatggaccgaaaatggcaattcaaatatcacagtctactataggtcaaacagagaaggaatcactttgaatgctaatcttagcggagatggttttcttaaaataaacccagatcacattgggttttatcgtgtaaactatgaagcagaaacttgggattggatagctgagactctctcctcaaaccacatgaacttctcttctgctgaccggtcaagttttatcgatgatgcttttgctctggcaagagctcaacttctggattatgagaaggccctgaacttgaccaggtatctcacatcagaaaaggatttcttaccatgggagagagtcatttcagctgtaagctacatcattagcatgtttgaagatgacagagagctgtaccccctgatagagacatacttccgaagccaagtgaagcccattgcggattctctgggatggcaggataccggaagccacatcacaaagttactccgggcctctgtattaggattcgcatgcaagatgggagacggagaagccttgggcaatgcttcccagttatttgaggcctggctgaaagggaatgaaagcattcctgtgaacctcaggctgctggtgtatcgctatggaatgcagaactctggcaatgaggcagcgtggaactatactctagagcagtaccagaaaacatctctagcacaagagaaagaaaagctgctctatgggttagcttcggtgaaggatgttacactcttggcaaggtatctggaaatgctcaaagaccccaatattattaaaactcaggacgtatttacagtcatccgctacatctcctacaacagctatgggaaaagcatggcctggaactggatccaactcaactgggactatctggtcaacagatttacaatcaacgacagataccttggccggatcgtcaccatagccgagcccttcaacactgagctgcagctctggcagatgcagagcttctttgcaaaatatccaaatgctggcgctggagcaaaacccagagagcaagtgctggaaacggtgaagaacaacatcgagtggctaaaactgaacagaaagtccatcagcgagtggttcaccagcatgccctaggagcgctgatgccttccgtttgtgcctccgctgcactgtggaacctgaggcgacctgttttacagactgcagagggagccttcaaaaccagttctgcttttgctaagtaccgtgtttatgtctcgcaaagctttttaaattattcctctttgtcgttgaaggaagatactaatagagtatttaatatactcagggatttctgctaagtgtactttatagggatgtctttacaaactgaagggtttaatagtcacattaatgtctttaaatatcattccttgtatcttaaatctgtgaaaatggagcaatttggtcccagctttacattttcagtaccaaagaaacaccacttaatcttctctcctgattgatttttaaagtttaaataccagtacgtgcaggacgtattgccatcttaatctttattttattattcagaattacatagacctaatatcattttattcacaaacgtctcactgctttaaatcctaccaaagtaaccttggcttaagttttggtgcaaacggatgtatctgcatgttggaaagctcgcaggaggcatgttggcaagatgagagtgcatgtttgggattactggggcttactgtccccacgccgggcggaagcttccagagatgtcttatagacaggtgtgtgaaggctgagagacagagtttggagccgtaacgtgtttgaaacaggaaagagtcagttctcggtggttaaaaatgagaggtttgcaggggatttttggtattcgacagccaagagtcagccagagaaaactcactcaccgggcccaacccggctttc

SEQ ID NO: 142 - DNA, 2345 bp, Rattus norvegicus
  Genbank Accession No. NM_022266
cacagctcttctctccaagaagactcagccagacccactccagctccgaccctaggagaccgacctcctccagacggcagcagccccagcccagtggacaaccccaggagccaccacctggagcgtccggacaccaacctccgccccgagaccgagtccaggctccggccgcgcccctcgtcgcctctgcaccccgctgtgcgtcctcctgccgcgccccgaccatgctcgcctccgtcgcgggtcccgttagcctcgccttggtgctcctcctctgcacccggcctgccaccggccaggactgcagcgcgcagtgtcagtgcgcagctgaagcggcgccgcgctgccccgccggcgtgagcctggtgctggacggctgcggctgctgccgcgtctgcgccaagcagctgggagaactgtgcacggagcgtgatccctgcgacccacacaagggtctcttctgcgacttcggctcccccgccaaccgcaagattggcgtgtgcactgccaaagatggtgcaccctgtgtcttcggtgggtccgtgtaccgcagcggcgagtccttccaaagcagttgcaaataccagtgcacttgcctggatggggccgtgggctgtgtgcccctgtgcagcatggacgtgcgcctgcccagccctgactgccccttcccgagaagggtcaagctgcccgggaaatgctgtgaggagtgggtgtgtgatgagcccaaggaccgcacagtggttggccctgccctagctgcctaccgactggaagacacatttggccctgacccaactatgatgcgagccaactgcctggtccagaccacagagtggagcgcctgttctaagacctgtgggatgggcatctccacccgggttaccaatgacaataccttctgcaggctggagaagcagagtcgtctctgcatggtcaggccctgtgaagctgacctagaggaaaacattaagaagggcaaaaagtgcatccggacgcctaaaattgccaagcctgtcaagtttgagctttctggctgcaccagtgtgaagacctaccgggctaagttctgtggggtgtgcacggacggccgctgctgcacaccgcacagaaccaccacactgccggtggagttcaagtgccccgatggcgagatcatgaaaaagaacatgatgttcatcaagacctgtgcctgccattacaactgtcccggggacaatgacatctttgagtccttgtactacaggaagatgtatggagacatggcgtaaagccagggagtaagggacacgaactcatttagactataacttgaactgagttacatctcattttcttctgtaaaaaaacaaaaaggattacagtagcacattaatttaaatctgggttcctaactgctgtgggagaaaacaccccaccgaagtgagaaccgtgtgtcattgtcatgcaaatagcctgtcaatctcagacactggtttcgagacagtttagacttgacagttgttcactagcgcacagtgacagaacgcacactaaggtgagcctcctggaagagtggagatgccaggagaaagacaggtactagctgaggtcattttaaaagcagcgatatgcctactttttggagtgtgacaggggagggacattatagcttgcttgcagacagacctgctctagcaagagctgggtgtgtgtcctccactcggtgaggctgaagccagctattctttcagtaagaacagcagtttcagcgctgacattctgattccagtgacactggtcgggagtcagaaccttgtctattagactggacagcttgtggcaagtgaatttgccggtaacaagccagatttttatggatcttgtaaatattgtggataaatatatatatttgtacagttatctaagttaatttaaagacgtttgtgcctattgttcttgttttaagtgcttttggaatttttaaactgatagcctcaaactccaaacaccatcgataggacataaagcttgtctgtgattcaaaacaaaggagatactgcagtggaaactgtaacctgagtgactgtctgtcagaacatatggtacgtagacggtaaagcaatggatcagaagtcagatttctagtaggaaatgtaaaatcactgttggcgaacaaatggcctttattaagaaatggcttgctcagggtaactggtcagatttccacgaggaagtgtttgctgcttctttgactatgactggtttgggaggcagtttatttgttgagagtgtgaccaaaagttacatgtttgcacctttctagttgaaaataaagtatatatatttttataaaaaaaaaaaaaaaa

SEQ ID NO: 143 - DNA, 1617 bp, Rattus norvegicus
  Genbank Accession No. NM_022298
gcgctgtaagaagcaacacctcctcctcgcctccgccatccacccggcagccgcgaagcagcaaccatgcgtgagtgtatctccatccacgtcggccaggctggtgtccagatcggcaatgcctgctgggagctctactgcctggaacatggcatccagcctgatggccagatgccaagcgacaagaccattgggggaggagatgactccttcaacaccttcttcagtgagacaggagctggcaagcacgtgccccgggcggtgttcgtagacctggaacccacagttattgatgaagttcgcactggcacctaccgccagctcttccacccagagcagctcatcacaggcaaggaagatgctgccaataactatgcccgtggccactacaccattggcaaggagatcattgaccttgtcttggacagaattcgcaagctggctgaccagtgcacgggtctccagggcttcttggttttccacagctttggtgggggaactggctctgggttcacctccctgctgatggagaggctctctgtcgactacggaaagaagtccaagctggagttctccatttacccagccccccaggtttccactgctgtggttgagccctacaattccatcctcaccacccacaccaccctggagcactctgattgtgccttcatggtagacaatgaggccatctatgacatctgtcgtagaaacctcgacattgagcgcccaacctacactaacttaaacaggttgataggtcaaattgtgtcttccatcactgcttccctcagatttgatggggccctgaatgttgatctgacagaattccagaccaacctggtgccctaccctcgcatccacttccctctggccacttatgcccctgtcatctctgctgagaaagcctaccatgaacagctttctgtagcagagatcaccaatgcctgctttgagccagccaaccagatggtgaaatgtgaccctcgccatggtaaatacatggcttgctgcctgctgtaccgtggtgatgtggtccccaaagatgtcaatgctgccattgccaccatcaagaccaagcgtaccatccagtttgtggactggtgccccactggcttcaaggttggcattaattaccagcctcccactgtggtccctggtggcgacctggccaaggtccagagagctgtgtgtatgctgagcaacaccacagccattgctgaggcctgggctcgcctggatcacaagtttgatctgatgtatgccaagcgtgcctttgtgcactggtacgtgggtgagggcatggaggagggagagttctctgaggcccgtgaggacatggctgccctagagaaggattatgaggaggttggtgtggattctgtggagggtgagggtgaggaagaaggagaggaatactaaattaaatgtcacaaggtgctgctttcacagggatgtttattctggtccaacatagaaagttgtgggctgatcagttaatttgtatgtggcaatgtgtgctttcatacagttactgactttaagtgtgaatgatttgtcagagacccgagccgtccacttcactgatgggttttaaataaaatactccctgtctta

SEQ ID NO: 144 - DNA, 1307 bp, Rattus norvegicus
  Genbank Accession No. NM_022390
gtgcttttgggtttggcgatcagttccgcgggagtcttgtcaggagcaggatggcggcttcgggcgaggcgcgccgagtgctggtgtacggcggcaggggtgctctgggctcgcgctgcgtacaggccttccgggcccgcaactggtgggttgccagcattgatgtggtggagaatgaagaggccagtgccagcgtgattgttaagatgacagattcattcacggagcaggctgaccaggtcactgctgaggtcgggaagctcctaggtgaccagaaggtggatgccattctctgtgtggctggaggatgggccgggggcaatgccaaatccaagtcactctttaaaaactgtgacctgatgtggaagcagagtatttggacatccaccatctctagccacttggccacaaagcacctgaaggaaggaggcctcttgaccctggccggggccaaagctgcgttggatgggactcctgggatgattggctacggcatggccaagggagccgtccatcagctctgccagagccttgcagggaagaacagtggcatgccgtctggggctgccgccattgctgtgcttcccgtcaccctggatactccgatgaacaggaaatcaatgcccgaggcagacttcagctcctggacacccttagagttcctggtggagaccttccatgactggatcactgggaacaaacggccaaactcaggaagcctaatccaggtggtaaccacagacgggaagacagagcttactccagcctatttctaagttgcacctcagtgcccaggagaaccctcttgaaactctactaacctgtgtctgtattgccgcacctggccccatgttgtctgtattcctgtttgtggtacgagataactagtcccgtttgtctcttacgtagtgctccttttttgtcctgggctggtgaggtatgtttatggggaatgagtgggggcctgtaagtagcaccatcagtgctgaggcccagggaggtatgtgtgcaggccgtcatcccagcatcccagactgctttggagacccgtttgatagttcattttttagcatttggggcactttgaaatccaacttgtttttaaattccatgttagtgccatagatgtagtttttgctgcctgaaaattaactgccatgaaaattcattggtgatgtaagtaagcaaaacctaatggactctgttggatatcatttgtgttccagcctaggctaagtgtttatgagaactattcgtgagtgttcggagtgttcttcctaataaacacatttcatgtccccgaattc

SEQ ID NO: 145 - DNA, 2410 bp, Rattus norvegicus
  Genbank Accession No. NM_022392
tacgctgctttggtggcgtgcacctctcacggtgtgcctagccgccgatgcccaggctgcacgatcacgtctggagctacccaagcgcgggcgctgcgaggccgtacagcctcccgcgaggcatgattgcggcggccctctgtccgcagggccccggagcccccgagcccgagcccgcgccccggggccagcgagagggaaccgcaggcttcagcgcacgacccggcagctggcaccacgacctggtgcagcggagcctcgtgctcttctcatttggcgtggtcctggctctggtgctcaacctgctgcagatccagcggaatgtcacgctcttcccggacgaggtgatagccaccatcttctcctccgcctggtgggtgcccccgtgctgtggcacggcagccgctgttgtcggcttattgtatccctgtattgacagtcacctgggagaaccacacaagttcaagagagagtgggccagtgtcatgcgatgtatcgcggtgtttgttggcatcaaccatgccagtgccaaattagatttcgccaataatgtgcagctgtccctgactctggcagccctatccttgggcttgtggtggacgtttgatcgatcccgaagtggcctggggctcgggatcaccatcgccttcctagccacgctgatcactcagtttcttgtttataatggcgtctaccagtacacgtccccagatttcctctatatccgttcttggctcccttgtatatttttctcaggaggtgtcacagtgggaaacataggacgacagttagctatgggtgttccagaaaagcctcacagtgactgagtttgagcacatgattcagggcggaagcagaatgtggagacactggtcctgggtgtggtgaagaggatctttttctcaatgttccatttagactgggctgatgataaatgactcctaaagatgcgttcacgtagtctaaatagcaagtggaggcaaggactacttacctaaagtcttaccttgctcacccaccctcacacctgtctgcactggaacattctatcccaggctgtatgtgagagttgggtaagggggccggtttcccgagtattagatttcactcatcattcaaagcaaaatgccatatttcaaagccttgaatcaaaatgaattaccaactagcagttttatatcagtgcccaaaggagagaggttgatggtgcttaacagagatgaagtatgtgcagtaagaatatttatccagaattaaaatatagggttgtgtaaagaggggctaagggcagcagtaagttggaggaagatcatgctccccggaggacccagtgcagccacatctccaggtctcgctcaggctggcgctcacacgtgggtctcatcagtgtgggaactatgctgtttactgacaggaggcttgtagacaatcttactgacagcccaggacaacacaaagtcaggattctgcattgcgatgctggacttttcatctcaatttaagtgaagttttatccaagatctggagcatctaagagtgaatagctgtctgctgtttcagtcgtaatgagccgaaattgtgtctctgtcactccagagtggagaggacttttccacagccctatggagcttgcaatctgtgattgccttgtaaaaggttgagtgtgcacgtcactgcgttcggtgcgcagtgtcctgtgtgtgttggacagcgtagaacacatgggaccttgcaagtattgggtcttcaacttcaagtgcaatgtgtatgaaaccaatctgagccttgtattctcttaaatatttattatttttttttaaccgcgcgagctgttctggagaagggttctcgggtcatttcagagctgtgtgaggcacactcagcaatactgtgtcagccgtgacgctccccagtcacaccctccactacaccctagtcctttgacatactccaggtttgtaagtttagtgatttttacttacaaatttacccttttttgcattctaaaattgtgtttaaattatatggaagtacttggtgtaggcagtcattggtccccgggcagcagaagctctgcctgtggaatcgggtttgggttcactctgcagggctcctcatagaggctttgcttatttgttttgaggaaaatgtctggagtaaacctttgttttctgaaactactttagctaaaagaaaatgggtgttctagactttggaatggttcttaaagtttcctggaaataaaaataatgattggcacttcaaagacattctttagccaagacttcagtgtctagcagaaaccacaagtgactagaagagcaagtgatcttggtgatgcacttgattgtatacaatgagtattttttctcttaaactggaaataaatctgttagaaataatatagcca

SEQ ID NO: 146 - DNA, 557 bp, Rattus norvegicus
  Genbank Accession No. NM_022396
gtgacttctgggcccagctctggggcaaagatgcccgcccttcacattgaggatctgccggaaaaggaaaaactgaagatggaggttgagcaacttcgcaaagaagtgaagttgcagagacaacaggtgtctaaatgttctgaggaaataaagaactacattgaagaacgttctggagaggatcctctggtaaagggaattccagaagacaagaatcccttcaaagaaaagggcagctgtgtcatttcctaaggaactctggagggaaattgttttcagttgggtcagattgttcttttgtttaatttttcccccaaatgaagccaaagtgtgtgtgaagaattgaggaaaaatgaaatcgagaaaaagactgtcatataagcactctccaagcactttgtgcatagaacaaacctgcttctcacccacacaccctctctcagaggagagcacctgagtgcagttattggatgaaggcctggctctccctttcaatatactgcttgctgtctccaataaagttttacctcgaaaaaaaaaaaaaaaaaaaaaaaaaa

SEQ ID NO: 147 - DNA, 946 bp, Rattus norvegicus
  Genbank Accession No. NM_022398
  misc_feature (1)..(946): n = a or c or g or t
atggcggcgacggcgagtcccggggctggccggatggacgggaaaccccgtacctcccctaagtctgtcaagttcctgtttgggggcctggctgggatgggcgctaccgtttttgtgcagcccctggacctggtgaanaaccggatgcagttgagtggtgagggcgctaagactcgagagtacaaaaccagtttccatgccctcactagcatcctgaaggcagaagggctgaggggcatttacactgggttgtcagccggcctactgcgccaggccacctacaccactacacgtcttggtatatatacagtgttgtttgagcgcctgactggggctgacggtacaccccctggctttctcctgaaagccctgattggcatgactgcaggtgcaactggtgcatttgtgggaccaccagctgaggtggccctcatcaggatgactgctgatggccggcttccagctgaccagcgccgtggctacaaaaatgtgtttaatgccctaattagaattgcaagggaagaaggagtccccacactgtggcggggctgcatccctaccatggctcgagctgttgtcgtcaatgctgcccaacttgcttcttactcccaatccaagcaattcttgctggactcaggctacttctctgacaacattctgtgccacttctgcgccatcatgatcagtggcctggtcaccactgctgcttccatgcctgtggatattgtcaaaactaggatccaaaatatgcgaatgattgatgagaagccagagtacaagaatgggctggatgtattgctgaaagtcgtccgctatgagggtttcttcagcctgtggaagggcttcacaccatactatgcccgactgggcccccacactgtcctcaccttcatcttcttggaacagatgaacaaggcctacaagcgtctcttcctcagtggctgag

SEQ ID NO: 148 - DNA, 1882 bp, Rattus norvegicus
  Genbank Accession No. NM_022399
cgggggccagtgtgccgccgccccctcggcccgccatgctcctttcggtgccgctcctgcttggcctcctcggcctggctgccgcagaccctgccatctatttcaaagagcagttcttggacggagatgcctggaccaaccgctgggtcgaatccaaacataagtctgattttggcaaattcgtcctcagttctggcaaattctacggggaccaggagaaggataaagggttgcagacaagccaagatgcccgattttacgcgctgtccgccagattcgaacccttcagcaacaagggccagacactggtggtacagttcaccgtgaagcatgagcagaatatcgactgtgggggcggctacgtgaagctgtttccgggtggcttggaccagaaggacatgcatggagactcagaatataacatcatgtttggtccggacatctgcggtcctggcaccaagaaggttcatgtcatctttaactacaagggcaagaacgtgctgatcaacaaggatatccggtgtaaggatgatgaattcacacatctatacacgctgattgtgcggccagacaacacctacgaggtgaaaattgacaacagccaggtggagtcgggctccttggaggatgattgggactttctgccgcccaagaagattaaggatcctgacgctgccaagccagaagactgggatgaacgagccaagattgatgaccccacagattccaagcctgaggactgggacaagccagagcacatccctgaccctgatgctaagaagcctgaggactgggacgaagagatggatggagagtgggaaccaccagtgattcaaaatcctgaatacaagggcgaatggaagccacgtcaaattgacaacccagattacaagggtacctggatacacccagagattgacaatcctgaatactcccccgatgcgaatatctatgcctatgatagttttgctgtactgggcttagacctctggcaggtcaagtctggcacaatttttgacaacttcctcatcaccaatgatgaggcctatgcagaggagtttggcaatgagacctggggtgtcaccaaggctgcagagaagcagatgaaggacaagcaggatgaggagcagaggcttaaggaagaagaagaagacaagaagcgtaaagaggaagaggaggccgaggataaagaggatgaggatgacagagatgaagatgaagatgaagaggatgagaaggaagaagatgaggaggatgccactggccaagccaaggatgagctgtagaggccacaccacctgcctccagggctggactgaggcctgaacacccgccacagagctggctgctccaataatgtctctatgagactcaagaacttttcattttttttccaggcaggttcaggtctggggtggattctgatttttgttccccctgcctcccccaatccctcccccaaccccccctttttttttactggtgtttgtctttaattcttcagccctcaacctcctggcctctcatttttgaatcaacattttttctttctgtccctttctccatctcttggtcactatcctccaactctaggaacaggtatggaggaaaagccctaggcttgagatttcatctgctctcctttctgaatctcagaggagggtaggagaagggggtggtatcttccctccccccagcactgaggaagaatggggctcttcccctttctcccttgcccccaggactgggccatttgtggggcagccagttctagcacagctcacactgagagtgtaagaactacaaacaaaatttctattaaattaagttttgtgtcttcaaaaaaaaaaaaaaaaaaaaaaaaaaaaaaaaaaaaaaaaaa

SEQ ID NO: 149 - DNA, 2012 bp, Rattus norvegicus
  Genbank Accession No. NM_022407
acctgtgttccaggagccaaaccagcaatgtcttcccctgcacagcctgcagttcctgccccactggccaacttgaagattcaacacaccaagatcttcataaacaatgaatggcatgattcagtgagtggcaagaaatttcctgtccttaaccctgcaactgaggaggtcatctgccatgtggaagaaggggacaaggcagatgttgacaaagctgtgaaggccgcaagacaggctttccagattggctccccatggcgcaccatggatgcttcagagagaggacgcttgctgaacaagctggctgacttaatggagagagatcgtctgctgctggctacaatagaggccatcaatggtgggaaagtctttgccaatgcgtacttgtcggatttaggaggcagcataaaagcattaaagtactgtgcaggctgggctgacaagatccatggtcaaacaataccgagtgatggagacattttcacttttacgagacgtgaacctattggggtgtgtggccaaatcatcccttggaattttccactgcttatgttcatttggaagataggccctgccctcagctgtgggaacacagtggtcgtcaagccagcagagcaaactcctctcactgctcttcacatggcatctttaataaaagaggcagggtttcctcctggcgtggtgaacattgtccctggttatgggccaactgcgggggcagcgatctcctctcacatggatgtggacaaggtggccttcacgggatcaacccaggttggcaaattaatcaaggaagctgcaggaaaaagcaatctgaagagggtcacgctggagcttgggggaaagagcccttgcattgtgtttgcagatgccgacttggacattgctgtcgagtttgcacaccatggagtcttctaccatcaaggccaatgctgcgtcgcggcatcccggattttcgttgaggagtcagtttatgatgagtttgtgagaaagagtgttgagcgagccaagaaatatgtccttggaaatcctctgacccaaggaataaatcagggccctcagattgacaaggagcaacatgataaaatccttgatctcattgagagtgggaagaaagaaggagccaaactggagtgtggtggaggacgctgggggaacaaaggcttctttgtccagcccacagtcttctccaatgtgaccgatgagatgcgcattgccaaagaggagatatttggaccagtgcaacaaatcatgaagtttaagtccatagatgatgtgatcaagagagcaaacaatactacctatggtctagcagcaggagtcttcacaaaagacctggacagggccatcactgtgtcttctgctctgcaggccggggtagtgtgggttaactgctatatgatcttgtcagcccagtgccccttcggtggattcaagatgtctggaaatggacgagaactgggtgaacatggtctttatgagtacactgagctcaagacagttgcaatgaaaatatctcagaagaactcctaagaagcagagtgaagagaaactctcagctgtggctacacgtctcctatcgtcaccagcaaagtgttgttttactataattttttcttctgttgatttctttacatgatgaatccatcagtgttactgttactcatagaaaacatgtagcttaatcctacaaaaccactcaccttctaatatgtgactccagtccttatcccagaataaaaggatagatttaggtgcaagctctctgtaactctgtcatgataggtgctttctgtcgtagctccctgtctagagtactcatttggtgaggaggaccagtcgtgatttaagctctgtccctctgtgaccccttgaactgcttctcggcatgcatgataactgcagagtcggctgctctgtttcccaggtgttgtgaaatgttttctagaaagccatgcctgcttatcaaatgaaatgcccagctgtaattagaatgcaaagctaataaaggg

SEQ ID NO: 150 - DNA, 552 bp, Rattus norvegicus
  Genbank Accession No. NM_022500
atgacctctcagattcgtcagaattattccaccgaagtggaagctgccgtgaaccgcctggtcaacttgcacctgcgggcctcttacacctacctctctctgggcttcttttttgatcgggatgacgtggctttggaaggcgtaggccacttcttccgcgaattggccgaggagaagcgcgagggcgccgagcgtctcctcaagttgcagaacgaacgcgggggccgtgcactcttccaggatgtgcagaagccatctcaagatgagtggggtaaaaccctggaggccatggaagctgccttggccctggagaagaacctgaaccaggccctcttggatctgcacgccctgggctctgcccgcacagaccctcacctctgtgacttcttggaaagccacttcctggataaggaggtgaagctcatcaagaagatgggcaaccacctgaccaacctccgtagggtgcagggcccacaaccagcgcagactggcgtggcccaggcatctctgggcgagtatctctttgagcgcctcactctgaagcacgactag

SEQ ID NO: 151 - DNA, 1387 bp, Rattus norvegicus
  Genbank Accession No. NM_022510
cctgtgggagcagccgggtagagaggagcgtggccttctcctctccccgccatggcttgtgcccgtcccctcatatcggtgtactctgaaaagggggagtcatctggcaagaatgtcactttgccagctgtgttcaaagctcccattcgaccggatattgtgaactttgttcacaccaacttgaggaagaacaatagacagccctatgctgtcagtgaattagcaggtcatcagaccagtgctgagtcctggggtactggtagagctgtggctcgaattccaagagttcgaggtggtggcacccaccgttctggccagggtgcctttggaaacatgtgtcgtggaggccgcatgtttgcaccaaccaaaacctggcgtcgttggcatcgcagagtgaacacaactcagaaacgatatgccatctgttctgccctggctgcctcggccttaccagctttggtgatgtctaaaggtcactgtgttgaggaagttcctgaactgcctttggtggttgaagataaagttgaaagttataagaagaccaaggaggctgttcagctgcttaagaaacttaaagcttggaatgacatcaaaaaggtctatgcctcccagagaatgagagctggcaagggcaaaatgagaaaccgacggcggatccagcgcaggggaccctgcattatctataatgaagataatggaatcatcaaggccttcagaaacatccctggtattactctgcttaatgtaagcaagctgaacattttgaaacttgctcctggtgggcatgtggggcgtttctgcatttggactgaaagtgctttccggaagttggatgagttgtatggcacttggcgtaaggctgcttccctcaagagtaactacaacctccccatgcacaagatgatgaacacagaccttagcagaatcttgaaaagcccagagatccaaagagcccttcgagcaccacgcaagaagattcatcgcagagtcttgaagaagaatccactgaagaatctgaggatcatgttgaagctgaacccttacgcaaagactatgcgtaggaacaccattctccgccaggctaggaatcacaaacttcgagtgaaaaagctggaagccgcagctgctgcactggcagccaaatcggagaagattgttccagagaagggggctggagacaaaaaacctgcagtaggcaaaaaaggaaagaagcctgtggatgccaagaagctgaagaagcctgcagggaaaaaggtggttaccaagaaaccagcagagaagaaacctaccacagaagaaaaaaagtctgctgcataaactattaaaatttgttaaattccagagagcaaaaagatacagcctatttgaataaatcaaagatgcagtg

SEQ ID NO: 152 - DNA, 1938 bp, Rattus norvegicus
  Genbank Accession No. NM_022521
gcggacgtgtcaggtctctctgcacttccattcctgaaggacccacacaatgctttccaaactagcaagtctgcagactgttgccgctctgcgtcgaggactccgcacctcagtcgcctctgccacatctgttgcaacgaagaagacagagcaaggcccaccatcctctgagtacatttttgaacgggaatctaaatatggtgcacacaattaccatcctttacctgtagccctggagagaggaaaaggcatttatatgtgggatgtggaaggcaggcagtacttcgacttcctgagtgcttatggtgctgtcagccaaggacactgccacccaaagatcatagaagccatgaagagtcaggtggacaagctgacattaacatctcgggctttctataacaatgtccttggtgaatatgaggagtacatcaccaagcttttcaactacaacaaagttcttcctatgaatacaggagtggaggccggagagactgcgtgtaagcttgctcgccgttggggctacaccgtgaaaggcatccagaaatacaaagcaaagatcgtttttgctgttggaaacttttggggtcggacgctgtctgcagtctccagttccacagatccgaccagttatgatggctttggacccttcatgccaggctttgaaaccatcccatataacgatctgcctgcgctagagcgtgctcttcaggatcccaatgttgctgctttcatggtggagcccatccagggtgaagcgggtgttatcgttccagatccaggatacctgacgggagttcgagaactttgcacccggcaccaggtcctgtttattgctgatgaaatacagacaggattggctagaactggtcgatggctagctgtggatcatgagaatgtcagacctgacatagttcttcttgggaaggccctttctggtggcttatatcccgtgtctgcagtgctgtgtgatgatgacataatgctgaccattaaaccaggcgagcacggctccacgtatggcggcaacccactaggctgccgaattgctattgcggctcttgaggttttagaagaagagcatcttgctgaaaacgcagacaagatgggtgccatcttgagaaaggagctcatgaagctgccatctgatgttgtgactgctgtgagagggaaagggttgctaaatgccatcgtcatccgagaaaccaaagattgtgacgcttggaaggtgtgcctgcgactccgagataatgggcttctggccaagccaacccatggtgatatcatccggcttgcccctccacttgtgatcaaagaggatgagatccgggagtcagtggagatcatcaacaagaccatcttgtccttctgagagtaggaactctggggagccatcttcagatggggctcttgtgaaactctgcttgggatgggcagattcggcttgtctgtctcctaaaagacaattttttgaatatgtattatatatttcagttgatgcatagtggagtgacacctaggaacctgcaggtggctgcgtgacacaagagtgagagcgagaggcatctctttgttaaagtttgactgtgtgggagctttctaaggagaaacagatctatctgcatacagcctgcagagtcctgccgtaatttacatgtgtctttacatcttccttgctggcatgaatgttttgtatttggaagtttttttctgagatactacataagaaactgttgaatcattataatcaatgaatggtaagatgattgagggttgagcatatgtaaaatactagtttaaagtacactttgcattggccaacagcagaatgtattatatagtttctgagaattcattaccaaattatactttaagtgcttgattgcaatttgtaaaacatttattttcagtatttctttgaataaagcttcgtttttcttt

SEQ ID NO: 153 - DNA, 2169 bp, Rattus norvegicus
  Genbank Accession No. NM_022531
cctcttatccactctccagccggctgcccgcctgctgcctcctctttgcgtccgctcagcctcgtccacgccgccaccatgagccaggcctactcgtccagccagcgcgtgtcctcctaccgccgcaccttcggcggcgccccgggcttctcgctcggttccccgctgagctctccggtgttcccacgagcaggcttcggtaccaagggctcctcgagctcagtgacatcccgcgtgtaccaggtgtcgcgcacgtcgggcggggccggaggcttggggtcgctgcgggctagccggctggggaccacccgagcaccatcctatggcgcgggcgagctgctggacttctcgctggccgacgcagtgaaccaggagttcctggccacgcgcaccaacgagaaggtggagctgcaagagctcaatgaccgcttcgccaactacttcgagaaggtgcgctttttggaacagcagaacgccgcgctcgccgccgaggtcaaccggctcaagggccgagagccgactcgggtcgccgagctctacgaggaggagatgcgagagctgcggcgccaagtggaggtcctcaccaaccagcgcgcccgcgtcgacgtggagcgtgacaacctgatagacgacctgcagaggctcaaggccaagctacaggaggaaatccaactgagagaagaagcagagaacaacttggctgccttccgagcggatgtggatgcagccactctggctcgaattgacctagagcgcagaattgagtcactcaacgaggagattgcattccttaagaaagtgcacgaagaggagatccgtgagctccaggcccagcttcaggaacagcaggtccaggtagagatggacatgtccaagccagacctcacagccgccctcagggacatccgtgctcagtatgagaccattgcggctaagaacatctctgaggctgaagaatggtacaagtccaaggtttcagacttgactcaggcagccaataagaacaacgatgcgctgcgccaagccaagcaggagatgatggaataccgacaccagatccagtcctacacctgcgagattgatgctctcaagggcaccaacgactccttgatgaggcagatgagggagctggaggatcgcttcgccagcgaggccagtggctatcaggacaacatcgcgcgcctggaggaggagatccgacacctaaaggatgagatggcccgccatctgcgggagtaccaggatctgctcaatgtgaagatggccttggatgtggagattgccacctaccggaagctgctggagggcgaggagagcaggatcaaccttccgatccagaccttctctgctctcaacttccgagaaaccagccctgagcaaaggggttccgaagtccacaccaaaaagacagtgatgatcaagaccattgagacccgggatggagaggtcgtcagcgaggccacacagcaacaacatgaagtgctgtaagccagacacgtgtcctggccccgtcctcactgcctcctgaagccagccttttccactctcggatgtcacacccagtcgcttttctcctctcacagcctctgaaccctcctcacaatcacctctttgtggtcttcatgctgcccagcctcaggaaacccctcagccacctctgcagaccctcccatgagccctggctattggcaactgtcaagcctggctcttaagagagaacctagctcaaggcctgacccttttccctgccatctttgtgacctctggcttagaagggggtaccagagagggcgatgggaccggcagggtcaggacagagctttgtggatatccccacattcgacccccagcctgggtcagagacagaatgaagcctcagcgagctgagatggagaagggggggcctgaaaaatgtcctcgtggcccctctctttcccaccccagctcagataggcttggaaagcaggggctgtaagagagaactggaaggtgctggatgtgggagcaggagatacagaaggagagaggatgggtgagaagttggagaggaaagaagagagaggcagagagtgggctcaggttggtgggaggatgccacctcccctgcctgcccctcccaccgcaggggccctggacagaaacaataaagagataagcacaaaaaaaaaa

SEQ ID NO: 154 - DNA, 871 bp, Rattus norvegicus
  Genbank Accession No. NM_022538
agatctgtgaccatgttcgacaagccgcggctgccgtacgtggtcctcgatgtgatttgcgtgttgctggctggattgccttttataattcttacttcaaggcatacccccttccaacgaggagtgttctgtactgatgagtccatcaagtacccttacagagaagacaccatcccttatgcgttattaggtggaatagtcattccattctgtattatcgttatgattactggagaaactctgtctgtttactttaatgtcttgcattcaaattcctttgtcagcaatcactatatagccaccatttacaaagccgttggagcctttttgtttggagcctcagccagtcagtccctgactgacattgctaagtactctataggcagactgcggcctcacttcctggctgtctgtaacccagactggtcaaaaatcaactgcagcgatggctacattgagaacttcgtatgtcaagggaatgaacagaaggtcagggaaggcaggttgtccttctactcggggcactcctcattctctatgtactgcatgctgtttgtcgcactttatcttcaagccaggatgaagggagattgggcaagactcttacgacccatgctacagtttgggcttgttgctttatccatatatgtgggcctgtctcgagtttctgattacaaacaccactggagcgacgtgttaattggcctcattcaaggagctgttgtggcaatattagtggttttgtatgtaactgatttcttcaagaccacagagtctaacaaagaaagaaaagaggactcacatacgactctacacgaaaccaccaacagacagagctacgcaaggaatcacgagccctgaaggggtcgac

SEQ ID NO: 155 - DNA, 3719 bp, Rattus norvegicus
  Genbank Accession No. NM_022543
gtgtggtggaattcaaaacatattaatccagtgtttttaagctcggaaacaaaggggctcagccaggctgccccaggggaagggtgataagaagttctgggaactccagagaagggaagagcgagcttcagaactcaccaggacttcacttttaggaaaaaccttgtggcagccaaggaccggcacacacagatccaggaggaactgcagacaaatggagatacaaacagtcccagggacagcaacagtcaccccatcccactggaccagaaggtaaaagacagccagaaagaggaatcagcccagactggcctccctggggccgctttgcagacaggaacccagcatacccttttgtattgctcaccctccacaaggagactgagggcaggaaggagaaacgatctcacctaggaaactgtcctcgggaccaaccttcaagtttcttttaaaagcctctgcacgccatctccatgaaccactgttggataacacaatgacgtggaaaatgggaccccacttcaccatgctcttggccatgtggctggtgtgtggatcagcatctcagtcttctgccttggatagcgatggccgcccaggaaggaaagtacctttggcttctccaatcagcagtaggtcagctcgatatctgaggcacactgggaggtctggtggagttgagaaatccactcaggaagaaccaaatcctcagtctttccaaaggaggaagagtgtaccagtgttgagattagctcacccgactgtgagaccgcccccctcaggtatcaatggagccccagtcagacctgagttgaaacccatagctaggggctccgcgagtgagatggtccgtgatgaggggtcctctgctcggacaagattgttgcgattcccctctggatccagttctcccaatatcctggccagctttgcaggaaagaacagggtgtgggtcatctcaccccctcatgcctcagagggttactcccgcctcatgatgagcctcctgaaggatgatgtgtactgtgagctggcagaaaggcacattcaacagattgtgctgttccaccaggctttttaggttggggggaaggtccggcggatcaccagtgaggggcagatcctggagcagcctctggacccaaatctcatccccaagctgatgagcttcctgaaactggagaagggcaagtttagcatggtgctgttgaaaaagtccctccaggtggaggagcgctacccctacccagtcagactggaagccatgtttgaggttattgatcaaggccccatccgcagattgagaaaatcaggcagaagggttttgtccaatagtgtaaggcctcgggcatagagggccatgtggtccaggaagggaacaatggcggtggtggaggaggaagcacaggcctgggcagtgacaagaggaaagaggacccaaggagaacacaaatccaccccactagagagcctccaagaaagcagaccaccaccaaggcagccactcctcaacctcccccgactccaagggccaccacgcttcctcctgctccagtcacaacagccactcgggccacatcccgggtggtgacagtagctgcaagacctacaactaccactgcctatccagctactcagaggccctggacatctcggctacatcccttctcagtctcccataggcctccggcaacagctgagatgaccaccgtcaggggcccctcagtctcagagcagctctaccctctacctcggaaggagcaacagagagaaaagccacaggccaccaggaggcctaacaaagccaccaactatggaagcttcacagccaccccgcctaccaccctctgggagggcagcacaagagctgtgggcacaagccgtttccgggacaaccggacagacaaacgagaacatggccatcaggacccaaatgtggtgccaggtcctcacaagcccataaaggggaagctgcccaaaaagaaggagaaaattctcagcaatgagtatgaagctaagtatgacctcagccggcccaccacctctcagggggaggaggagctgcaggtggataacattccctcccagaatgccaaggagtcaaaaaagcatgaaaagcccgagaaacccgagaaggagaagaaaaaaaaggggaagagtgcaaaaccagacaagttactcaggagcgaaaagcaaatgaagaaagctgagaaaaagagcaagcaggagaaagagaagactaagaagaaaaaggcaggtaagacagagcaggacgactatcagaagcccacagcaaaacatctcgctccgagtcccaggaagtcagtggccgacctgttggggtctttcgaaggcaaacgaagactcctcctgatcaccactcccaaggccgagaacaatatgtacgtgcagcagcgggatgagtatctggagagcttctgcaagatggccaccaggaggatctctgtggttactatctttggtcctgtcaacaacagctccatgaaaattgaccacttccagctagataatgagaaacccatgcgtgtggtggatgacgaggacttggtagaccagcatctcatcagtgagctgaggaaggagtatggaatgacctacaatgacttcttcatggtgctgacagatgtgggtctcagagtcaagcaatactacgaagtgccaatagcaatgaagtccgtgtttgatctgatcgatactttccaatcccgaatcaaagatatggaaaaagcagaagaaggagggcattacctgcaaggaggacaagaggcagtccctggagaatttcctatccaggttccgatggaggaggcggttgctggtgatctctgctcccaatgacgaagactgggcctattcacagcagctctccgccctcaacggtcaggcatgcaattttggcctgcgacatataaccattttgaagcttttgggcgttggagaggaagttggaggcattttagaactgttcccaattaatgggagctccactgttgagcgggaagatgtgccagcccacctggtcaaagacatccgcaaactattttcaagtgagcccagagtacttctccatgcttctagttggaaaagatggcaatgttaaatcttggtatccttctcctatgtggccgatggtcatcgtgtatgacttaattgattccatgcaacctcggagacaggaaatggccattcagcagtcactggggatgcgctgcccagaagatgagtatgcgggatatggttaccatagttatcaccaaggataccaggatggctacccaggatgactaccgtcatcatgaaagttaccaccatggatacccttactgaacagaaatgtgtaaccttattcccatccagtttccccttcatctgctaaagctgtgtgcagacagcttcataagggaatttctccatattctacataccctgcctttttctctcagtgttcttacaagattaaaggaatagtaaactttcccctactcatgagttattattaagacatttaaaagaactctctatcttgagagaggaaaatgtgctgctaaataatttttactgaaaaacaaaaggtagtatctcttttctcatataatagctattattagataagcaaatgtatataaactatttgtacatcttcatttcttctatcaatttgtaagtaaaaaattgtgttaaggaaaaaaaaaaaaaaa

SEQ ID NO: 156 - DNA, 1097 bp, Rattus norvegicus
  Genbank Accession No. NM_022594
agctccagagatggctaccgcgatgacagtttccagcaaactcctcggcctgctgatgcagcagctgagaggtacccgccagctgtacttcaacgtcagccttcgatctctgagctcctctgcacaagaggcgtccaaaagaatccctgaggaagtctcagaccacaactacgagtctattcaagtaacatctgcccagaagcatgttctgcatgtacaactaaaccggccggagaagaggaatgccatgaacagggctttctggagggagttggtggaatgcttccaaaagatatctaaagactccgactgtcgggctgttgtggtctctggtgcaggaaagatgttcacttcaggtattgacctcatggacatggcatcagacatcctgcagcccccaggagacgatgtggcccgcatagcctggtacctccgagacctcatcagccgataccaaaagactttcactgtcattgagaagtgccccaagccggtgatcaccgcaattcacggaggctgcattggtggaggcgtggatcttatttctgcctgtgacattcgctactgcactcaggatgctttcttccaagtcaaggaggtggatgtgggcctggctgctgatgtaggaacgctgcagcgactgcccaaggtcattgggaaccggagcctggtcaacgagctgaccttcaccgcccgcaagatgatggctgacgaggccctggacagtgggctggtcagccgcgtgttcccagataaggacgtcatgctgaatgcagcctttgccctggcggccgatatttccagcaagagtcctgtggctgtgcaggggtcaaaaatcaatttaatctactcccgagaccattctgtggacgagagccttgactatatggccacttggaacatgagcatgctgcagacccaggacatcatcaagtcagtccaggcagccatggagaagaaggactcaaaaagcatcaccttctccaagctctgagtgccttcctgaccctggtcccctcagtgcctcctcccggtgtataactttatgacttagttcttcagttcccggggccttatctccactgtgaacaataaag

SEQ ID NO: 157 - DNA, 1904 bp, Rattus norvegicus
  Genbank Accession No. NM_022597
gagcgactgcgggcccaggttgtcgcgctgcgctcggtgagtacaggatccagcttccaggatgtggtggtccttgatccctctctcttgtctgctggcactgaccagtgcccatgacaagccttcctcacacccactgtcggacgacatgattaactatatcaacaaacagaatacaacatggcaggctggacgcaacttctacaatgttgacataagctatctgaagaagctgtgtggaactgtcctgggtggacccaacctgccggaaagggttgggttcagcgaggacataaatctacctgaatcctttgatgcacgggaacagtggtccaattgcccgaccatcgcacagatcagagaccaggggtcctgtggctcttgttgggcatttggggcagtggaagccatgtctgaccgaatctgcattcacaccaatggccgagtcaatgtggaggtgtctgctgaggacctgcttacctgctgtggtatccagtgtggggatggctgtaatggtggctatccctctggagcatggaacttctggactagaaaaggcctggtttctggtggagtatacaattctcatataggctgcttaccctacaccatccctccctgtgaacaccatgtcaatggctcccgtcccccatgcactggagagggagatactcccaagtgcaacaagatgtgtgaggctggctactccacatcctacaaggaagataagcactatgggtacacttcctacagtgtgtctgacagcgagaaggagatcatggcggaaatctacaaaaatggcccagtggagggtgcttttactgtgttttctgacttcttgacttacaaatcaggcgtatacaagcatgaagccggtgatgtgatgggaggccatgccatccgcattctgggctggggaatagagaatggagtaccctactggctggtagcaaactcctggaacgttgactggggtgataatggtttctttaaaatcctcagaggagagaaccactgtggaattgaatcagaaatcgtggctggaatcccacgcactcagcagtactggggaagattctaatctgctgggacttgattgtatagtccttaggagactttttccaaaatttagcaatgcaggcagggagtgaggcagataggagtctttgattctttgagttcacctaacatgcatgaagctttcagcaaggtttgggtgactggaccagagctgccccccatcagagccaccctacctggctcccttctagcctatcccatgacagtgatcacagcctacatcctagcctctccctagactagtgctgtgtgtagcgcctgctgctgtggctctgtctgccatccctcccacccccacctcagcatccccagaccaagggctttggctgcaggatttccaaaggaatgaacaccaactacatgatgagaggacagatgccacccgccagctgcaccttgaagctagtcacttctaggactgtggcaggctttgatggcccaatgcagttctctggagaaaactacctttccccaaggcatctgcacccattgacaatggtaatgtgcccatctctccttggtcctgccctcaaccgatgcttttccagtcagggttttgttttttgttttgttttgtgtacctcaactgagttatgaagatttgtactggttttacagatcatctcatcgtatggaaaagaacaagcttcgtggtcagtttactgggtgaccggcagacaccacaatcaaactagtctggggaaaacctgcttttttgttgtaggtgccacgtaaccctgtcagtttgacaaggaatgaccgtgccaataaaccaattctccctctgcttggaaaaaaaaaaaaaaaaaaaaaaaaaaaaaaaa

SEQ ID NO: 158 - DNA, 1468 bp, Rattus norvegicus
  Genbank Accession No. NM_022607
cgcccgggcaggtgtaccatggcggtctctctcctgctgcggggaggacgaatccgggcgctgaaggctgcccttctcgaggcaaaggtgttccgaggagaactggcttctacagtgcccctgtctacagagtccgagaataataaaaaggcggcaggaccaactagcaagacggaaagtgtgttcaaagatgtggtgggagcagaggagagggccaagctcctagacactcacacagcagcggcactgtccaaaagctcccctccacccagttcttacccatcagtggagaacacaggtggggctgtcgcaggcctgccgctcacagacttgtcaagaaagactttggtagcgtttcctcagaaagttacgcctccaccgcatgcctgggcttctgactcggaggctcggcggcatgtccagaaagtgacgaaagattcatcttcatcttcctcatccagctcctcagattcagactctgatggggaggaacatggctccgacattggtccccgagtggcaagcaaaagcaaggcagggttttccaaacctgaggcttctcgtccctcgaagaacggagcccctaagatcacagtttttgcaaaagagaaggccaaggtgcagaagccacacacagatgtcacctacccagagaagcccctgcagcctaagaagaaagggactttcaccaagcctgtagaagatagtaaagaaatcaggtccaagctcatgacatccaagccacagtccagtgaggttttggagcaaaaaatgaaggaaaaacagcaccagggaaaacggagaccagacaagacaggaaaggaaagcacagagctgtttgaagctgaaggaattttacccggccacaggaaagccagagtttccacacagcccacaaccggaacacaagaggccagcgcagaactccggccagccgctgcccccgagtcgggagctagacaggaagccaaagggccagagctcgaatggaagaccgcttctcccctggtcagaaaagaaagcctggagaagcaggtgccagaagggagcttccaggcggaggaggagacctcaggagatcagacactagggagatattcgaagacagttcctgttgaggagaaaaatacctttggagagagagctggaccacaactggaggggacgttccaggcgccagccggcgaagccccgcccactgatgcaggcccaccccaggaagccccaggcgacacacaggagcccacactggttcccgagtcgagtgacaccaccacctacaagaacctgcagcatcatgagtacaacgcattcaccttcctagacctgaacctggacctctccaagttcaggctgccacagccgtcttcgggacgagagtcgccccggcactgaactcaactcagggtagacccccgtgtggtcccttgaattcttgcctgtgagaataaaagtcagaggcacaaat

SEQ ID NO: 159 - DNA, 470 bp, Rattus norvegicus
  Genbank Accession No. NM_022643
ctgttttgagacgttggagtggacaaacttatttttccacgatgccggaggtgtcggcaaaggggactactatttccaagaaagggttcaagaaagcagtcaccaagacccagaagaaggagggccggaaacgtaagagatgccgcgaagagagttactccatctacatttataaggtgctgaagcaagtgcacccggacaccggcatctcttccaaggccatgagcatcatgaactccttcgtgacagacatcttcgagcgcatcgcgggcgaggcatcgcgcctggcgcattacaacaagcgctcgaccatcacgtcccgggagatccagacggctgtccgcctgctgctgcccggggagctggccaagcacgctgtgtccgagggcaccaaggcggtcaccaagtacaccagctccaagtgagcccacagagctcacaacagacccaaaggctcttttcagagccac

SEQ ID NO: 160 - DNA, 378 bp, Rattus norvegicus
  Genbank Accession No. NM_022647
atgcctgagcccgccaagtcccgtcccgccccgaagaagggctccaagaaggctgtgaccaaggcccagaagaaggacggcaaggaacgcaagcgcagccgcaaggagagctactcggtgtacgtgtacaaggtgctgaagcaagtgcacccggataccggaatctcttccaaggccatgggcatcatgaactcgttcgtgaacgacatcttcgagcgcatcgcgggagagcgtcgcctggcgcattacaacaagcgctcgaccatcacgtcccgggagatccagacggccgtgcgcctgctgctgcccggggagctggccaagcacgcggtgtccgagggcaccaaggcagtcaccaagtacaccagctccaagtga

SEQ ID NO: 161 - DNA, 4950 bp, Rattus norvegicus
  Genbank Accession No. NM_022953
ctgggagcatctaggtgctactcgagccgcaagggcgcatcgtacgatccccccggctcttcggtccctcggtggggatagcacctggagatagccccggacggggatggtcagcggctgcggccgtctgacacacgagcgggacacggcgagggcaccatggcgctaacgccccagcgcgggtcctcttcggggttgagccgaccagagctgtggctgctgctatgggcagccgcgtggcgcctgggggccacggcgtgccccgccctctgcacctgcaccggcactacagtggactgccacggcacgggtttgcaggccatccccaagaacatcccacggaacaccgagcgcctggaactcaatggtaacaatatcactcggatccataagaatgactttgctgggctcaagcagcttcgagtgttgcagctgatggagaaccagattggagctgtggaacggggagcttttgatgacatgaaggagttggagcggctacgactgaaccgcaaccagctgcaagtgttgcctgaactactgttccagaacaaccaggctctgtccagactggacctgagtgagaattctctccaggctgtgcccagaaaggctttccgaggagccacagacctcaaaaatctacagctggacaagaaccagatcagctgcatcgaggaaggggccttccgtgccctacggggactggaggttctgaccctgaacaacaacaacatcaccaccatccctgtgtccagtttcaaccatatgcccaagcttcggaccttccggctgcactccaaccacctgttctgtgactgtcacctggcctggctctcgcagtggctgagacagaggcccaccatcgggctcttcacccagtgctctgggcccgccagccttcggggcctcaatgtggcagaggtgcaaaagagtgagttcagctgctcaggccagggggaggctgcacaagtacctgcctgcaccctctcatccggttcctgcccagccatgtgcagctgtagcaatggcatcgtggactgccgtggcaaaggcctcactgccatccctgctaaccttccggagacgatgaccgagatccgcctggagctgaacggtatcaaatccatcccaccaggagccttctctccctacagaaagctgcgcaggatagacctgagtaacaaccagattgctgagattgcacccgatgccttccaaggcctccgctccttgaattccctggtcctctatggcaacaagatcacagacttgccccgaggtgtatttggaggcctgtacaccctccagctgctgcttctgaatgccaacaagatcaactgcatccggcctgatgccttccaggacctgcagaacctctctctgctctccctatatgacaacaagatccagagtctcgccaagggcaccttcacctccctgcgggccatccagacactgcatctggcccagaaccctttcatctgtgactgtaacctcaagtggctggcagacttcttacgtaccaaccccattgagacaactggggcccgctgtgccagcccccggcgccttgccaacaagcgtatcgggcagatcaaaagcaagaagttccggtgctcagccaaagagcagtacttcattccagggacggaggattaccacctgaacagcgagtgtacgagtgacgtggcctgtccccacaagtgccgctgtgaggccagtgtggtggagtgctctggcctgaagctctctaagatccctgagcgaatcccccagtccacgactgagctacgactgaacaacaatgagatttcaatcctagaggccactgggttgtttaagaagctctcacatctgaagaaaataaacctgagcaacaacaaggtgtcagagattgaagacgggacgtttgaaggcgccacctccgtcagcgagctgcacctgaccgccaaccagctggagtctgtcagaagcggcatgttccggggtctagatggcttgcggaccctgatgctgaggaacaaccgtatcagctgcatccacaatgacagcttcactgggctgcgtaacgtgcggctcctgtctctttacgacaaccacatcaccaccatctcccctggagccttcgacaccctccaggccctgtccacactaaacctcctggccaacccattcaactgcaactgccagttggcctggctgggggactggcttcggaagaggaaaattgtgacagggaaccctcgctgtcagaacccagacttcctgcggcagattcctctgcaagatgtggccttccctgacttcaggtgtgaggaaggccaggaggaggtgggctgcctgccccgcccacagtgcccccaagagtgcgcctgcctggacaccgtggtccggtgtagcaacaagcacctccaggctctgcccaagggcatccccaagaatgtcacagaactctacttggatgggaaccagttcacactggttccgggacagctgtctaccttcaagtatctgcagcttgtcgacctgagcaacaacaagatcagctccttaagcaactcttccttcaccaacatgagtcagctgaccacactgatcctcagctacaacgccctccagtgcatcccccctctggccttccaaggacttcgttcactgcgcttgctgtctttgcatggcaatgatgtctccaccctccaagagggaatctttgcagacgtgacgtctctgtctcacctggccattggtgccaaccccctgtactgcgactgccacctccgatggctctccagctgggtgaagactggctacaaggaacctggcattgcccgctgtgctggacccccagagatggagggcaaactgttgctcaccacacctgccaagaagtttgaatgccaaggtccccccagcctggcggttcaggccaagtgtgatccctgcttgtccagcccatgccagaatcagggcacttgtcacaatgaccctcttgaggtatacaggtgtacctgccccagtggctacaagggccgaaactgtgaggtgtctctggacagctgttccagcaacccatgtggaaatgggggaacctgccatgcccaggagggcgaggatgctggcttcacgtgctcctgtccttccggctttgaagggctgacgtgtggaatgaacacagatgattgtgtgaagcacgactgtgtcaatgggggtgtctgtgtggatggcatagggaattacacatgtcagtgccccctgcagtacacaggaagggcctgtgaacagctagtggacttctgctctccggatctgaacccatgtcagcatgaggcccaatgtgttggcaccccagaggggcccaggtgtgagtgtgtgccaggctacacgggtgacaattgcagcaaaaaccaggacgactgcaaggaccaccagtgtcagaacggggctcagtgtgtggatgagatcaacagctacgcctgtctctgtgctgagggctacagcggacagctctgtgagatcccacctgcccccaggaactcctgtgaagggactgagtgccagaatggagccaactgtgtagaccagggcagccggcccgtatgccagtgcctaccaggctttggaggtcccgaatgtgagaagttgctcagtgtcaactttgtggaccgggacacttacctgcagttcactgacctgcagaactggcctcgggccaacatcactcttcaggtctccacagcagaggacaatgggatcctcctctacaatggggataatgaccacattgcagttgagctgtaccagggccatgtccgtgttagctacgacccaggcagctaccccagctctgctatctacagtgctgaaacaatcaacgatgggcagttccacacagttgagctggtgacctttgaccagatggtgaacctctccatcgatggtggcagccccatgaccatggacaactttggaaagcactacacactcaacagtgaggcccccctctatgtgggagggatgcccgtggatgtgaactcagctgccttccgcctgtggcagatcctcaatggcaccagcttccacggttgcatccggaatctatacatcaacaacgaactgcaggacttcaccaagacacagatgaagccgggcgtggtgcccggctgcgagccctgccgaaaactctactgtctacatggcatttgccagcccaacgccaccccagggcccgtgtgccactgcgaggctggctgggggggcctgcactgtgaccagccagtggacggcccctgccatggccacaagtgtgtccatgggaaatgcgtgcccctcgatgcacttgcctacagctgccaatgccaggatggatactcgggggctctgtgcaaccaggtcggggctgtggcagagccctgtgggggcttacagtgcctgcatggtcactgccaggcctcggccaccagaggggcacactgtgtgtgcagcccaggtttttcaggcgagctgtgtgagcaagagtccgagtgccggggggaccctgtccgggactttcaccgggtccagaggggctatgccatctgccagaccacgcgcccactgtcatgggtggaatgccggggcgcgtgcccgggccagggctgctgccagggcctgcggctgaagcggaggaagctcaccttcgagtgcagcgatgggacctcgtttgctgaggaggtggagaagcccaccaagtgcggctgtgccccgtgtgcgtaacgtgcgggtggcacactagcagctgggctggggcgggcatcaccaggatagcgcttgggtcctggtgggcgcggggacactgagctgcctttccagcggactgcactgccagggcagaggagcaaggcccgggttgccaagccctctcccaaagtgccttgcacagataggcgcttaataaatatttgttgaatg

SEQ ID NO: 162 - DNA, 5523 bp, Rattus norvegicus
  Genbank Accession No. NM_022955
atcactccaggcaagtgtctggccgcgccaagcagagcgcgaaagtctcggagctccgggcaactgctccatccgcacctgtgggaacctcgcgtcccgcacctggcacggctgggttgcggtgctccgctgtcctccggggtatggcgcgcgtgaagacagggtctcccggccacaagggccgcctgtgagtccaagagccgaagattgagtgggagcgcgaccgcgcgcactatgcctgtccgggcggaggcgagggcggcttggcgcgtggtggccctggcgctgctgctgctccccgcaatgcctgcagcctccccgccgctaaccccgcgcccgctgcagccgagcatgccccacgtgtgtgcagaacagaagctgaccctggtgggccaccgccagccttgtgtgcaagccttcagtcgcatagtgcctgtgtggaggaggacaggctgcgcacagcaggcgtggtgtattggccaagagcgcaggactgtgtactatatgagctacaggcaggtatatgccacagaggcccgaacggtgttcaggtgctgccctggctggagccagaagcctggccaggaaggctgcctctcagatgtggacgaatgcgccagtgccaacgggggttgcgagggcccatgctgtaacactgtgggtggcttttactgccgctgcccacccggctaccagctgcagggtgacggcaaaacctgccaagatgtggatgaatgtcgagcacacaatggtggttgtcaacacaggtgtgtgaacacccccggttcttacctctgtgaatgcaaacctggcttccggctccacacagatggcaggacctgcctggccatcagctcctgcactctgggaaacggtggctgccagcaccagtgtgtacagctcacagtgacacagcaccgctgccagtgccggccccagtaccagctgcaagaggatggcaggcgctgtgtgcggagaagcccgtgtgcagaaggcaatggtggctgtatgcatatatgccaggaactccggggccttgcccactgtggctgccaccccggttaccagcttgctgcagaccgcaaaacctgtgaagatgtggatgaatgtgctttggggctggcccagtgtgctcatggctgcctcaacactcagggatcctttaagtgtgtgtgccacgcaggctatgaactgggcgccgatggccggcagtgttaccggatcgagatggagattgtgaacagctgtgaggctggcaacggtgggtgctcccacggctgtagccacaccagcactgggcccctgtgcacctgccctcgtggttacgagttggatgaagaccagaagacctgtatcgacatcgacgactgcgccaactctccgtgctgccagcaggcatgtgccaacacccctggtgggtatgagtgcagctgtttcgctggctaccggctcaacacggacggctgtggctgtgaggatgttgacgagtgcgcctctggtcacggtggctgcgaacaccactgttctaatctggcgggctccttccagtgcttctgtgaggccggttaccggttggatgaggaccgcaggggctgcacttccctagaagaatctgtggtggacctggatggccggctgccctttgtgcggcccctgccccacattgcggtgctgagggatgagctgccccgactcttccaggatgattatggggctgaggaggaggcggcggcagcggagttgcgtggagaacacacgctcactgagaagtttgtctgcttggatcactccttcgggcatgactgcagcctaacctgcgatgactgcaggaatggggggacttgcttcccgggccaggacggctgtgactgcccagagggctggactggaatcatctgcaatgagacttgtcctccagacacctttgggaagaattgtagctctccctgcacctgtcagaatggtgggacctgtgacccggtgttgggagcctgccgctgtcctccaggcgtcagtggagcccactgtgaggatggctgccccaagggcttctacggcaaacattgccgtaagaaatgccactgtgctaaccggggccggtgccaccgcctctatggggcctgcctctgtgacccagggctctatggtcgtttctgccaccttgcctgtcctccctgggccttcgggccaggctgttctgaggactgcctttgcgagcagtcacacacaaggtcttgcaacccgaaggacggtagctgctcctgcaaggccggcttccagggtgagcgctgccaggcagagtgtgagtcaggcttctttggaccaggctgcagacaccgttgcacctgccagccaggtgtggcctgtgaccctgtgagtggcgagtgtcggactcagtgtcctcctggctaccagggggaagactgtggccaagagtgcccggtgggaacatttggtgtgaactgctcaggttcctgttcctgcgttggagcgccttgtcaccgagtcacaggggagtgtctgtgcccaccagggaagactggggaggactgtggagctgattgtcccgagggccgttgggggctcggctgtcaagagatctgccccgcatgtgagcacggagccagctgcaaccctgagactggaacctgcctgtgtctccctggctttgttggtagccgctgccaggacacttgctcagcaggctggtacgggactggctgccagataaggtgtgcttgtgccaacgatgggcattgtgacccaaccaccggacgctgtagctgtgcccccgggtggactggcctcagctgccagagagcctgtgacagtggacactgggggcccgactgcatccacccttgcaactgcagtgcgggccatgggaattgtgacgccgtcagtggcctctgcctgtgtgaggccggctatgaaggtccacggtgtgagcagtcgtgtcgccagggatactatgggcccagctgtgagcagaagtgcagatgtgagcatggggctgcctgtgaccatgtcagtggggcctgtacctgcccagccggctggaggggaagcttctgtgaacatgcctgtcctgctggcttctttgggttagactgtgacagtgcctgcaactgctctgccggggcaccctgtgatgctgtcaccggctcatgcatctgcccagctggccgctggggcccacgctgtgcccagagttgcccacccctcaccttcgggcttaactgcagccagatttgtacctgtttcaatggggcctcctgtgactctgtcacagggcaatgccactgtgcccctggctggatgggacccacctgcctgcaggcctgccctcctggcctgtatggcaagaactgtcagcattcctgtctttgccgcaacggagggagatgtgaccccatcttgggccagtgcacgtgcccagagggttggaccggcttggcctgtgagaacgagtgccttcctggacactatgcagccggttgtcagctcaactgcagttgccttcacgggggcatatgtgaccggcttaccggccactgcctctgcccagctggctggactggggacaagtgtcagagctcctgcgtcagtggcacgtttggggttcactgtgaggaacactgtgcttgccggaaaggtgcctcctgccaccatgtcacaggggcctgcttctgtcctccaggatggaggggcccacactgtgagcaggcctgtccacgcggatggtttggagaggcctgtgctcagcgttgcctctgcccaaccaatgcctcctgccaccatgtcactggggagtgccgctgtccacccggctttactgggcttagctgtgagcaggcttgtcagcctggcacctttggaaaggactgtgagcacctgtgccagtgtcctggtgagacctgggcctgcgaccctgcttcaggggtctgcacgtgtgccgctggttaccatggcaccggctgtctgcaaagatgcccatctgggcgctatgggccgggctgtgaacacatttgtaagtgtctcaatggtgggacctgcgacccagccacgggagcctgctactgtcctgctgggttccttggggccgactgcagccttgcctgtccacagggtcgctttggccccagctgtgcccacgtgtgtgcatgcaggcaaggggcggcatgcgacccggtgtcgggggcttgcatctgttctcccgggaagacgggggtccgctgtgagcatggctgtccccaggaccggtttggcaagggctgtgaactcaagtgtgcctgcaggaatgggggcctgtgtcatgctaccaacggcagctgttcctgccccctgggctggatggggcctcactgtgagcacgcctgccctgctgggcgctatggtgctgcctgcctcctggagtgtttctgtcagaacaatggcagctgtgagcctaccacgggcgcttgcctctgtggccctggcttctacggtcaagcttgtgaacactcttgcccctccggcttccatggacctggttgccagagagtttgtgagtgtcaacagggagccccctgtgaccctgtcagtggccagtgcctctgccctgctggcttccatggccagttctgtgagaaggggtgtgagtcaggctcttttggagatggctgcctgcagcagtgtaactgccacacgggtgtgccctgtgatcccatcagcggcctctgcctttgcccgcctgggcggacaggagccgcatgtgacctggattgcagaaggggccgctttgggccgggctgcgccctgcgctgtgattgcgggggtggggccgactgcgaccccatcagtgggcagtgccactgtgtggacagctacatgggacccacttgccgggaagtgcccacacagatatcctctagcagaccagcaccccagcaccccagcagcagggccatgaagcactaaatcagaggaacacccacagatgtccactactgtgttccagcccaagggacccaggcctctgctggagactgagaagacgcaggtgggacatctgagtccatgcctctcctggaaagccatggatctctgtggacgcagccacacatcagggctctgtggtcatggggaagaaggcctcctttgaacataaggaatccagggaagtggactgggcctcaggccgctgtttacatggggaccctgcaggctgcgctgtggaatcctggctctcttcagggatctggggtggggataagcaaggccccacctgcctgctaggtccttctggtgctaagccatggactgctgcggccagccaactgtttacctggaaatgtagtccagtctgtatttatgtaaggtatttatgggcaattccacatgccgttatgaccctggtcagctggaagctgcctgatctcagaactcaggcagaaggctttggggtggggtggggggctttgccagcaagtgggattaagggttttgtaaaacccagtgagttaaaggcacagtggtgtcctc

SEQ ID NO: 163 - DNA, 1408 bp, Rattus norvegicus
  Genbank Accession No. NM_024125
acgggaccgggacgcagcggagcccgcgggccccgcgttcatgcaccgcctgctggcctgggacgcagcatgcctcccgccgccgcccgccgcctttagacccatggaagtggccaacttctactacgagcccgactgcctggcctacggggccaaggcggcccgcgccgcgccgcgcgcccccgccgccgagccggccatcggcgagcacgagcgcgccatcgacttcagcccctacctggagccgctcgcgcccgccgccgcggacttcgccgcgcccgcgcccgcgcaccacgacttcctttccgacctcttcgccgacgactacggcgccaagccgagcaagaagccgtccgactacggttacgtgagcctcggccgcgcgggcgccaaggccgcaccgcccgcctgcttcccgccgccgcctcccgccgcactcaaggccgagccgggcttcgaacccgcggactgcaagcgcgcggacgacgcgcccgccatggcggccggcttcccgttcgccctgcgcgcctacctgggctaccaggcgacgccgagcggcagcagcggcagcctgtccacgtcgtcgtcgtccagcccgcccgggacgccgagccccgccgacgccaaggccgcgcccgccgcctgcttcgcggggccgccggccgcgcccgccaaggccaaggccaagaaggcggtggacaagctgagcgacgagtacaagatgcggcgcgagcgcaacaacatcgcggtgcgcaagagccgcgacaaggccaagatgcgcaacctggagacgcagcacaaggtgctggagctgacggcggagaacgagcggctgcagaagaaggtggagcagctgtcgcgagagctcagcacgctgcggaacttgttcaagcagctgcccgagccgctgctggcctcggcgggtcactgctagcccggcgggggtggcgtgggggcgccgcggccaccctgggcaccgtgcgccctgccccgcgcgctccgtccccgcgcgcgcccggggcaccgtgcgtgcaccgcgcgcacctgcacctgcaccgaggggacaccgtgggcaccgcgcgcacgcacctgcaccgcgcaccgggtttcgggacttgatgcaatccggatcaaacgtggctgagcgcgtgtggacacgggactgacgcaacacacgtgtaactgtcagccgggccctgagtaatcacttaaagatgttcctgcggggttgttgctgttgatgtttttgtttttgttttttgttttttgttttttttttggtcttattatttttttgtattatataaaaaagttctatttctatgagaaaagaggcgtatgtatattttgagaaccttttccgtttcgagcattaaagtgaagacattttaaaaaaaaacggcacgag

SEQ ID NO: 164 - DNA, 711 bp, Rattus norvegicus
  Genbank Accession No. NM_024127
gggactcgcacttgcaatatgactttggaggaattctcggccgcagagcagaagatcgaaaggatggacacggtgggcgatgccctggaggaagtgctcagcaaggctcggagtcagcgcaccataactgtcggcgtgtacgaggcagccaagctgctcaacgtagacccggacaacgtggtcctgtgcctgctggctgcggatgaagatgacgaccgggacgtggctctgcagatccatttcaccctcattcgtgctttctgttgcgagaacgacatcaacatcctgcgggtcagcaacccgggtcggctggcagagctgttgctactggagaacgacaagagccccgctgagagcgggggcctggcgcagaccccggacttacactgtgtgctggtgacgaacccacattcatcacaatggaaggatcctgccttaagtcaacttatttgtttttgccgggaaagtcgctacatggatcagtgggtgccagtgattaatctccccgaacggtgattccccgaacggtgatggcatctgaatggaaataactgaaccaaattgcactgaagttttgaaatacctttgtagttactcaagcagtcactccccacgctgatgcaaggattacagaaactgatgtcaaggggctgagttcaactacaggagggctaggagatgactttgcagatggacagagaggtgaaaata

SEQ ID NO: 165 - DNA, 628 bp, Rattus norvegicus
  Genbank Accession No. NM_024131
tgaattcctggaacctcaactggctcccactgctctctcggtgcagttaccgtttggcgatccctctcctgctaacatgccgttcgttgagttggaaacaaacttgccggctagccgcatacccgcagggctggagaaccggttgtgtgcggccacagccaccatcctggacaaacccgaagaccgcgtgagcgtgacgatacgaccgggcatgaccttgttgatgaacaaatccacagagccctgcgcccacctcctgatctcttccatcggtgttgtgggcaccgcggagcagaaccgcagccacagctccagcttcttcaagttcctcaccgaggagctgtccctggaccaggacaggatcattatccgattcttccccttggagccctggcagatcggaaagaaaggaactgttatgacgtttctgtgatggagacaaggaacgcagggcgtttgcttgagcctgtccagagcccttccagagaggcctcctggcagatacgataccagatccctcttttgcataagtgtctgtgatctcactgacctgttttcctctcccccagcctcgtgaacgagagagcaataaagaagagagcataatcccaaaaaaaaaaaaaaaaaa

SEQ ID NO: 166 - DNA, 9731 bp, Rattus norvegicus
  Genbank Accession No. NM_024137
ccgccggcctgcggccgagcgagcgcggcggaggcgctggcgctgggcaattcggtgactcctttctcctccggagcgaggaaggaaggaaggagagaaggaaggaaggaagcgaagaaggaggggactgtctccatggaaggttcaggcggaggcgccctcgccttgcgggtgcaccggccgcagagcagttccagccgccgccggctggcccccggcgcgtggagacgggtgaagtccctgagttttgtcaaagccaacgataatcagatctacttgaaagattaagtgaattgatttgattggaacattctctcaacagccagccaataggaagtgtcaggacaatcatgcccatgagaactctcaactgttcaggtgattgcacttcagtgaaactggctgttgaacattgctggagttgatgggcagaatttctcctggactattcatcatcccagtcccatcctagttgagagagatttaaatgccataagaatcctttgtaacgttgcactttgcttttgaagatggacatttctaggatggagagaactgttatagtttggttccaggacattggcatccaatgcccactgactccagtgtgagcctggaaggttccagagagagagggaacaatccacgcgtttgcagacgaccaggaacgcagaagcaacccagctttacaaagcacagcgttggagacacctccatgagtctgcttggcttccgggcaaagtagcacttaagaccttgtgttaaaatggacactggggacacagctctaggacaaaaagctacctcaaggtctggagaaactgacagtgtgtcaggtagatggaggcaggaacaatcagccggtcttaagatgagcactttcagcagtcaggaagggcagagacaaccgcaaatagatcctgaccagatcggaaatgtagcttcagctcagctgttcggttctgggaagctggcctcgcctggcgagggcgtacatcaagtcacagagaagcaatacccaccacaccgtccgagtccctacccatgccaacattcgctctctttccctcagcactcattgccccagggcatgatgcacagcaacaagccgcaccagagcctcgagggccctccctggctcttctctggccctttgccatctgtggcctctgaggacttatttccttttccaatgcacggccacagtagtggttaccctagaaaaaagatctcaagtctcaaccccgcttacagccaatactcccagaaaagtatcgaacaggcagaagatgctcacaaaaaagagcacaaacccaaaaagccgggcaaatacatctgcccgtactgcagcagggcatgtgcaaaaccaagtgtcctgaagaaacacatcaggtcccataccggtgagcggccgtatccgtgtataccttgtggtttctctttcaagacaaagagcaatttgtacaagcacaggaagtctcatgcccacgcaattaaggcaggcttggtacccttcaccgaatcatctgtgtctaagctggacctggaggctggctttattgatgtagaagcagagatccactcggatggtgaacagagcacagacacggatgaggagagctctttatttgctgaggcttctgacaaagtgagccccggccctcccatccctttggacattgctagcagaggtggctaccccggatccttggaagaatccttgggaggtccgatgaaggtgccaattttgattatccccaaaagtgggatcccgctacccaatgagggctctcagtatctgggccctgacatgctcccaaacccgtctttgaatgctaaggccgatgactctcacacagtgaaacagaaacttgcactgagactgtcagagaaaaaaggacaagactctgagccatccctcaaccttctgagcccacacagcaaggggagcacagactctggctacttttctcgctcggaaagtgcagagcagcagataagcccacccaacacaaacgcaaagtcttacgaagaaatcatctttgggaagtactgtcgactgagtcccaggaatacactcagtgttacccccacgggtcaggagcgtaccgccatggggcggaggggcctcgtggaaccattacctcatgtaaacaccaggttggaggtcaagatgtttgaagatcccatcacacagctgattcccagcaaaggagaaatggaccccagtcaagtcaacatgttgaagaccacgaagttcaacagtgagtgtcggcagccacaagccatggcggcatctgttaggaatgaaggaaaaccttacccaggaagtttcccaggcagcaatcccattctcttagaagctcccgtggactcttcaccccttattagaagcaactcaatgccaacttcttcagcaactaacttaagcatccctccttctttgagaggaagccactcgtttgatgaaaggatgacgggctctgatgacgtgttctatcccggcactgtaggcatacctccccagcgcatgcttagacgacaggcagccttcgagctgccatcggtgcaagagggtcacatggagtttgagcaccctgcaagggtacccaagatccttgccggctcatccctgaaggaaaagaaattagttcccggagataggtctggctatgactatgatgcctgccgtaaaccgtataagaagtgggaagaccctgaaacaccaaaacagagctacagagatatctcttgcttgagcaccttcaaacatggaggggaatattttatggacccctcagtgccattgccgggagtgccaaccatgttcgggacgacctgcgagaacagaaagcgcaggaaggagaaaagtgtaggggacgaggaggatacgcctatgatctgtggtggcatggggagtgctcctgggagcatgatgtcctcagagtatgactccaagctgcaggacggaggaaggagtggcttcaccatgactggacatgagagtcttcctcatggttactccgatcgtttagacctggcccggccccagctgccgtctagaagtccgtctcttgggtctgaggatttgccctcggctggtgatcctgacaagatgacagacctgggcaagaagcctccgggaaatgtgatttcggtgattcagcacacaaactcgctgagccggcccaattccttcgaaaggtctgagtcaacagaaatggcagtcagtacacaggacaagaccccctcaccttctgagatgggcgacagtgaggttttggaaggccccgtaagcccagagtgggctcctccaggggatggtgcagagagtggaagcaggccaaccccttcacagcaggtacctcagcactcctaccatgggcaaccaaggcttgttcgccaacacaacatccaggtccccgaaatcagagtcacagaagaacctgataagcccgagaaggagaaggaggctcctaccaaggagcccgagaagcctgtggaagaattccagtggccccagagaagcgagactctttctcaactccctgctgagaagttgcctcccaaaaagaaacgcttgaggctcgcagatatggagcactcctcaggggaatccagtttcgagtccacaggcaccggcctctctcggagtcccagccaagaaagcaacttatcccacagttccagtttctccatgtcctttgacagagacgaaacggtcaagctcaccgcacctcccaagcaggatgagagcgggaagcattccgagtttttgactgtccccgcgggttcatactcattgtctgtcccgggtcaccaccaccagaaagaaatgcggcgttgctcctctgagcagatgccctgtcctcacccgacggaagtcccagaaatacggagtaaatcatttgattatgggaacctgtcccatgctccagtggcgggagcatccccatcaacattatcgccatcccgggagaggaagaaatgctttctggtacgccaggcttccttcagtggctccccagaaattgcccaaggtgaagccggcatggaccccagcgtcaagcaggagcagctggagcagctgcatgctggcctcagggctgcatggaccactgtgctcccacccctgccaggggatgacccagggaagcaggtggtcggtccttgtggccagctgagctcagggccaccgctccaccttgcccagcaacagatcatgcacatggacagtcaggaatctctgagaaatccgttgattcagccaacatcctacatgacaggcaagcacttacccgaacaaccgcacctgtttccacatcaagacgcggtcccgttttctcctatccagaatgccttgtttcagtttcagtacccgactgtctgtatggttcatttgccagctcagcagcctccctggtggcaggcgcatttcccccatcccttcactccacaccctcagaacagctacagcaagcctcctttccaagctgacattcattctagctattccttagagcacgtagcagaacacactggaaagaaatctgctgactatccgcatgcaaaagagcagacttacccgtgctattccggagcatcagggctacactccaagaacctccctccgaagtttccatcagaccctggcagtaaatccactgaggctccgcccactgaacagcttcttcgagaagattttgcctcagaaaatgctgggcctttgcagtccctaccgggaacggtggttcctgttcgcatccagacccacgttccatcctatggaagtgtcatgtacacaagcatttctcagatacttggacagaatagccccgccattgtcatatgcaaggtcgatgagaacatgacccaaagaacactggtaaccaacgcggccatgcaagggataggatttaacatagcccaagtgcttgggcagcgcacaggcttggaaaaataccctctttggaaagtacctcagaccctacccctgggcttggaatcctccatccccttgtgtttaccgtccacctcagacagcgcggcctctctcggaggaagcaagcggatgctgtctccagccagcagtttggagctcttcatggaaaccaagcaacagaaacgggtgaaagaggagaagatgtacgggcagattgtagaagagctcagtgctgtggagttaaccaactcggacatcaagaagggcctctcccgcccccagaagccccagctcgtgaggcaagggtgtgcctcggagccgaaggacggcagctctcagtcaaggtcatcttccttctcctccctgtcaccctcctcgtctcaagaccatccggctgccagcgggcctttccctcccaacagggagatactttcaggttccagggcgccgccgcgacggaagttcagtgggccctcagaaagcagagagtcctccgatgagctggacatcgatgagacctcgtcagacatgagcatgagcccccagagctcttcgctgcccacaggaggcagtcagcaggaagacgaagggaaggcccgcaagctgccagtcagcatgctagtccacatggcctctggtccgggaggaaatgtggcaaattccactcttcttttcacagacgtggcagatttccagcagatccttcagttccccagtctgcggacaacaactactgtgagttggtgcttcttaaattatacaaaacccaattttgtgcaacaggccaccttcaaatcctccgtttatgcttcatggtgcattagttcctgtaacccaaacccatcaggattgaacaccaagaccacgctggccctcctgagatccaaacaaaaaattaccgccgaaatttacactctggctgctatgcacaggcccggaactggcaagctcacatcatccagtgcctggaagcagtttgcacagatgaaacctgatgcacccttcttgtttggcaacaaactagaaaggaaattagggggaaatgtcttaaaggaaagagggaaaggagagattcacggagataaagatcttggatccaaacaaaccgagccaatccgaattaagatctttgaaggggggtacaaatccaatgaagattatgtgtatgtcagaggacgtggacggggaaagtacatttgtgaagagtgtggaattcgctgtaagaagccaagcatgctgaaaaaacatatacgcactcatactgatgttcggccttatgtatgcaagttatgtaattttgccttcaagacgaaaggaaacctaacgaaacacatgaaatctaaggcccacatgaaaaagtgtctggagctgggcgtctcgatgacatcagtagatgagacagaaacagaagaagcagaaaatatggaagatttgcacaaaacatctgagaagcacagcatgtccggcatttcaactgaccaccagttctcagatgctgaggaatctgacggagaggatggagacgataatgatgaagatgatgaagacgatgatgactttgatgaccaaggagatttgacacccaaaacaaggtcaagaagcaccagtcctcagcctcctcggttctcctccttgcctgtcaatgttggcgctgtagcccacggcgtcccctcagatagctctctgggacattcgtcattgatcagctatttggttactctacccagtattcaggtcactcagctcatgacacccagtgactcttgtgaagacacccagatgacagaatatcagaggctgttccagagcaaaagcacagactccgaacccgacaaagacaggttagacatcccaagctccatggacgaagaggccatgttgtcttcagagccaagctcctccccaagggacttctccccctcaagctaccggtcctcaccaggatatgattcttcaccctgtcgagataattcgccaaagaggtatctgatacccaaaggagatttgtcacccagaagacatttatcacctagaagagatctatcacccatgaggcatctgtcaccaagaaaagaagctgcattgaggagagagatgtcccaaggggatgcttcaccaaggaggcatttgtccccacggagaccattgtctcctggaaaagacattacaacaagaagggacctctctcccagaagagagagaagatatatgactaccattagagcaccatctcccagaagggctttataccataacccaccattaccaatggggcagtatctgcaaacagagccaattgtattggggcctcctaatctaagaagaggattacctcaggttccttacttcagtctctatggagaccaagaaggtgcttatgaacatcacggctccagccttttccctgagggtcctactgactatgtcttcagtcatcttcccctccattctcagcagcaagtgcgagctcctatccccatggtgccagttggtgggatccaaatggttcactccttgccgccagccatttccggtttacatcctccacccacattgcctctgcccacagagggctctgaggagaagaaaggagcacccggggaggccctcacccaggatccctacaccctttccaggcggcatgagaaacaagcccctcacgttttgcagtcatctggtctacctagttctccctcctccccacggctattgatgaaacagagtacttcagaagacagcctaaattccacagagagagaacaggaggaaaacatacagacttgtacaaaagccatcgcctcactccggattgcaacagaagaggcagctctgcttggggctgatcagcccacatgggtgcaggagtccccgcagaaacccttggagagtgcacacatcagcattagacactttagcgggcctgagccaggtcagctctgtacctcagccgcccaccctgacttacacgatggtgaaaaggacacttttggtacatcacagactgcagtagcccaccccacgttttacagcaagggcagtgtggatgagaagcaggtggactttcagagcagcaaggaattatctttaagcacagaggaaggcaatgagccctcatcggaaaagaatcgactccattgatctgcaatgcatggacacattcatttccacatttccccctccccccttttgtttttgtttttctagggatagaaataaacgagttgatagcatgcctgtcctaagttacagtagttggctattataaatacttttgttattttgaagacaattagggaaattaacaagtcatcttgagcctgaccaaaacaaaatttgaaattaacctattgggtctggtaactttgaaaaaaattgtacagatgtttgtgccttttctttactttgcttatattcttataagcatttttttagcggtaatttgtacatattttagaatttgtgtatctgctttgtaataaatgtaatctctttcctcttttggacacttggatcttaacgacgtaaagcaaagcagcatctatatatattgtgaggttgcactaaaacatatttttatatgataaaactgaacagcttttatgtacagctctcattctgtaatactaatatttattttgtttcataaactgtacatttttttcttaatgttgtggattgcttttctatgtgaagcatgggttccctgttgcgtaactagaacagaaatgtccattgtaagcaagatatttaaactagaatatcttattctgcacttatgcataagttacaaaaaaaagataaagaacgtatcagtcggttcttaacctgtaaattctttttgtctcttgtttgccggattgacaataacttaagagctgattgtgatttttaaatggatagtaccgtaaagcattaaagtaaacaatgtgctattgtgagtttttttcaaagctttataaatcagttataaataatattaaaagtatttggtcttatgtgaacatgttgatctatatactcaccttaaaaaatatgggaaaaacattccgcccccatgtaaatatgtacaagtgcatcactggtacagttttgtgttactcggttggacacgaggttgccacagacctatgctagagtgtctttaaaattaaagtgagaaagcacatggactgtgtagagcttggttatcggccggcccggtggcttggtaggcagtgctgtgcgctgcctgtggagaagacctgggcttaaaaatcttggttcttgctgcacaggatggtgactggaactaaggctgcatggagggttcgcacttggactcgagggttgggtgtggaagtggggaagagggatggagacctgctccccagctcttcccatcagcctgtccataatggttacagggttaccatcagcattaggaaatgtcaccttaccctttgaatagggaaagagtgtcactcctggctgtctcagggggaatgaagcagagaggccttcaaaagaaagcagctctggggagaaggaagtttttttgtatctaaccttcagaacggcttttgatcagtgttgaaggtgggaagagcctttgcaggtctagaagagcagagcagagggaggggtacagcaacatgtgcacacgcatgcacatgtatgtgcatgcgcacacacaatctgggttatctttgtgctatatagtggattataattctgtgaaaccaagtttgtatattgaattacattaaggagtgttctttaaaaagagaaataaatatacaattacatgctt

SEQ ID NO: 167 - DNA, 2488 bp, Rattus norvegicus
  Genbank Accession No. NM_024388
gcgaaagttggggtagtgtgcgagaaggattgcagagcgcacgcggaaccagactgcgactgggtcctgggtcgctggtcccggccacggggagcgggagccggccggagatgccctgtatccaagctcaatatggaacaccagcaaccagcccaggaccgcgtgaccacctgacaggtgaccccctggcccttgagttcagcaagcccaccatggacctggccagccccgagacggcgcccaccgcacctgccaccctgcccagtttcagcaccttcatggacggcggatacaccggagagtttgacaccttcctataccagctgccggggacagcccagccgtgctcctcggcctcctccacatcttcttcctcgtcctcggccacctctcccgcgtcggcttcctttaagtttgaggactttcaggtgtatggctgctaccctggcaccctgagcggcccattagacgagaccctgtcctccagtggctctgattactatggaagcccctgctcagccccgtcaccacctacacccaacttccagccatcccagctctccccttgggatggttcatttggccacttctcccccagccagacttatgaaggccttcgggtatggactgagcagttgcccaaggcttccgggcctccgccacctccaaccttcttctccttcagtcctcccaccggtcccagccccagcctggcccagagttccctgaagttgttcccagcaccagccacccaccagctaggggagggggagagctattccgtgccagccgctttcccgggcttggcacccacctctccgaactgtgacacttccggcattctggacgcacccgtaacctccaccaaggcccgcagtgggtcttcagggggcagtgagggccgctgtgctgtctgtggagacaacgcttcgtgccagcattatggggtccgcacctgtgagggctgcaaaggcttcttcaagcgcacagtacagaaaagtgccaagtacatctgcctggcaaacaaggactgccctgtggacaagaggcggcggaaccgctgccagttctgtcgcttccagaagtgcctggctgtgggcatggtgaaggaagttgtccggacagacagcctaaaggggcggcggggccggctaccttcaaaacccaagcagcccccagatgcctcccctaccaatctcctcacgtccctcattcgagcacatttggactccgggcctaacactgccaagttggactattccaagttccaggaactggtgctgccccgctttggaaaggaagatgccggtgacgtgcagcaattttatgacttgctctctggctccctggacgtcatccggaagtgggcggaaaagatcccgggcttcattgagctttccccaggagaccaagacctgttgctagagtccgcctttctggagctctttatcctccgcctggcctaccgatctaagcccggtgaggggaagctcatcttctgctcaggcctggtgctacaccggctgcagtgtgcccgcggctttggtgactggatagacaacattctagccttctcacggtccctgcacagcttgggtgttgatgttcctgcctttgcctgcctgtctgctctggtcctcatcactgatcgacatggcctccaggaccctcggcgggtggaggagctgcagaaccgcattgctagctgtctgaaggaacacatggccgccgtggcaggagacccacagccggccagctgcctgtcacgtctgctgggcaaactgcctgagctccggactctgtgcacccaaggcctacagcgcatcttttgcctcaagctggaggacttggtgccccctccacctatcgtggacaagatctttatggacaccttgtctttctgaccctgccccgaacacgcgtgcacactcacgtgcatgttcttcttgtcacccacgtgcctttaagcccatagcccacggacccccagaccaccccaccccccagcctgttttttgagctaagactgatgtatctcctcattccagaagatggacagagagagagagagagctcaagacctgggggggagggtgtgtattcacgggggtgaccccactatttctcttatccctcccagctcagacctggccttccgcgtgtttttgtaagataaaccatttttaacacataccactctgctgtatataagctgacgctgctgtaaatacagaaaggaagaggtcggggtgggggtttgagaggaagggtgggccccccaaccccgccagctgggcaagcctctcgagcctccaacttgagatctcttccgctctccttccatgtgtacatagctgtcactcaagaaggtgattgacagattctgatttatatttgtgtatttttttcctggatttataggatgtgactttttctgattaatatatttaatatattaaataaaaactagacatgtagctgaaaaaaa

SEQ ID NO: 168 - DNA, 2535 bp, Rattus norvegicus
  Genbank Accession No. NM_024392
gagcagtaccccggccactgccagtgtgtgcgtggtgcaggatagactcatggcttcgcctctgaggttcgacgggcgtgtggtcctggtcaccggcgccgggggagggttgggcagagcttatgccctggcttttgcagaaagaggagcattagttgttgtgaatgacttaggaggggacttcaaaggcgttgggaaaggctcttctgccgcagacaaggtcgtggaagaaataagaaggagaggcgggaaagcggtggccaattacgattcaggcgaagcaggcgagaagcttgtgaagacagcactggacacattcggcagaatagatgttgtggtgaacaatgctgggatcctgagggaccgttccttctctaggataagtgatgaagactgggatataattcaaagagttcatttgcggggctccttccaagtgacccgggcagcatgggatcatatgaagaagcagaattatggaagaatcattatgacggcctcagcttctggaatatacagcaactttggccaggcaaattatagtgctgcaaagctgggccttctgggtctcgccaatactctcgtgattgaaggcaggaagaacaacattcattgtaacaccattgccccaaacgctgggtcacggatgacagagacggtgatgccagaagacctcgttgaagccctgaagccagagtatgtggcaccgctggtcctttggctttgccatgagagctgtgaggaaaatggtggcttgtttgaggttggagcaggatggattggaaaattgcgctgggagaggaccctgggagccattgtcaggaagcggaatcagcccatgactcccgaggcagtgagggacaactgggtgaagatctgtgacttcagcaatgccagcaagccgaagagcattcaagagtccacaggtggtataatcgaagttttacataaaatagattcagaaggaatctcacaaaatcacaccggtcaagtggcatctgcagatgcatcaggatttgctggcgtcgttggccacaaacttccttcattttcttcttcatatacggaactgcagtgcattatgtatgccctcggagtaggagcttcagtcaaaaatccaaaggacttgaagtttgtttatgaagggagtgctgacttctcctgtttgcctacatttggagtcattgtcgctcagaagtccttgacgagtggaggcttagcagaggttcctgggctgtcaatcaactttgcaaaggttcttcatggggagcagtacttggagttgtataagccacttccccgatcaggggaattaaaatgtgaagcagttattgctgacatcctggataaaggctctggcatagtgattgttatggacgtctattcttattctggcaaggaacttatatgctataatcagttctctgtcttcgttgttggctctggaggctttggtggaaaacggacatcagaaaaactcaaagcagctgtagccgtaccggatcggcctccagatgctgtactgagagataccacttcactgaatcaggccgctctgtaccgcctcagtggagactcgaatcctttacacattgacccgagctttgcgagcattgccggttttgagaaacccatattacacggattatgtacttttgggttttctgcaaggcatgttttacagcagtttgcggataatgatgtgtcaagattcaaggccattaaggttcgttttgccaaaccagtgtatccaggacaaactctacaaactgagatgtggaaggaaggaaacagaattcattttcaaaccaaggtccaagagactggagacattgtcatttccaatgcatatgtggatcttgttcctacatctggagtttccgctcagacaccttctgagggtggagcactgcagagtgctcttgtatttggggaaataggtcgacgcctcaaggatgttggacgtgaggtggtaaagaaagtaaatgctgtatttgaatggcatatcacgaaaaatgggaatgttgcagccaagtggaccattgacctgaagaacggctctggagaggtttaccaaggccctgccaaaggctctgctgacacgaccatcacaatttctgatgaggatttcatggaagtggtcctgggcaagcttaacccacagaatgccttcttcagtggcagactgaaggcccgaggaaacatcatgctgagccagaagctacagatgattctgaaagactatgccaagctctgaaggacccactgcgtgctttaataaaaccagaatcattacgttctgtctacgcagtcatgctccagccttctttgaaacgatccacggtaatgtgcagcagaaatcgcttaacattttcagattcagataactttcagattttcattttctactaatttttcacatattatttttataaggaactgtaatctagctagcaaataattgttctgttcatagatctgtatcttaataaaaaaaaagtcaaccgaaaaaaaaaaaaaaaaaaaaaaaaaaaa

SEQ ID NO: 169 - DNA, 8040 bp, Rattus norvegicus
  Genbank Accession No. NM_024396
agcggggcccggcagggcgcgcagagaagagggccgcggcgctgaggcggcggagcgcggcccggccatgggcttcctgcaccagctgcagctgctgctctggaagaacgtgacgctgaagcgccggagcccgtgggtcctggcgtttgagatcttcatcccccttgtcctcttcttcatcctgttgggactgcggcagaagaagcccaccatctctgtgaaggaagctttctacacggcagcaccgctgacatcggccggcatcctgcctgtcatgcagtcgctttgccctgatggccagcgtgatgagtttggcttcctgcagtatgccaactccacggtcacccagcttctggaacgcctcaaccgtgtagtggaagagagcaacttgtttgacccagagcgacctagcctgggctcagagcttgaggcactgcaccaacgtctggaggccctcagctcgggccctggcacctgggagagccactcagctagacctgcagtttcatccttctctctggactcggtggccagggacaaaagagagctttggcgtttcctgatgcagaacctgtcactgcccaacagcacggcccaggccctcctggctgcccgtgtagacccttctgaggtctatcgcttgctttttggtcctttacctgacctggatggaaagttggggttcctcaggaagcaggagccctggagtcacctgggtagcaatcctctgttccaaatggaggagctgctgctggctcctgcccttttggagcaactcacatgtgctccaggctctggggagctgggccggattcttaccatgcctgagggtcatcaggtagaccttcagggctaccgggatgctgtctgcagcgggcaggctacagctcgtgcccagcatttcagtgatctagccactgagctccggaaccagctggacatagccaagattgcccagcagctgggcttcaatgtccccaacggctcagatccacagccgcaggcaccgtccccacagagtctgcaggcactcttaggggacctgctggatgtccagaaggttctacaggatgtggatgtcctatcagcccttgccctgctgctgcctcaaggtgcctgtgctggccgggcccccgcacctcaagctggcagcccgagtggcccggccaacagcaccggggtaggggcaaatacaggtcccaacaccaccgttgaggagggcacccagtcacctgtcaccccagcctctccggacactctgcaaggccagtgctcagcctttgtgcagctctgggctggcttgcagcccatcttgtgtggcaacaaccgtaccattgagcctgaagcactccggaggggcaacatgagctcactgggctttacgagcaaagaacaacggaacctgggccttcttgtgcacctcatgaccagcaaccccaaaatcctgtatgcacccgcaggctctgaagctgaccatgttatcctcaaggcaaatgagacctttgcctttgtgggcaacgtgacgcactacgcccaggtctggctcaacatctccgcagagatccggagcttcctggagcagggcaggctgcagcagcatctgcactggctgcagcagtacgtggctgacctccggctacaccctgaagcaatgaacctgtcactggacgagctgccccctgctctgcgcctggactacttttctctgcccaatggcacagcccttctgcagcagctagacacaatagacaatgcagcctgtggctggatccagttcatgtccaaggtgagtgtggacatcttcaaggggtttcctgatgaggagagcatcgtgaactacactctcaatcaggcctaccaggacaatgttacagtatttgccagcgtgattttccagacacggaaggatggttccctccccccacatgtccattacaagattcgccagaactcaagcttcaccgagaaaaccaacgagatccgtcgtgcttactggcgtccagggcccaacactggtggccgcttctacttcctctacggcttcgtctggatccaggacatgatagaacgtgccatcatcaacacgtttgtggggcacgacgtggtcgaacccggcaactacgtgcagatgttcccgtacccctgctacacccgtgacgacttcctgtttgtcattgagcacatgatgccactgtgcatggtgatctcctgggtttactctgtggccatgaccatacagcacatcgtggcggagaaagagcatcggctaaaggaggtgatgaagacgatgggcctgaacaacgccgtgcactgggtggcctggttcatcacgggctttgtgcagctgtccatctccgtgacagccctgaccgccatcctcaagtatggccaggtcctcatgcacagccacgtgctcatcatatggctcttccttgctgtctatgctgtggccactatcatgttctgcttcctggtgtctgtgctgtactctaaggccaagttggcctcggcctgcggcggcatcatctacttcctgagctacgttccctacatgtatgtagcaatccgtgaggaagtagcccacgataagatcactgccttcgagaagtgcattgcgtccctgatgtccacaacagccttcggcctgggttccaagtactttgctctgtatgaagtggcaggtgtgggcatccagtggcacacgttcagccagtccccagtggaaggggatgacttcaacctgctccttgctgtcaccatgctgatggtggacacagtggtctatggcgtactcacttggtacattgaggctgtgcacccaggtatgtatgggctgccccggccctggtacttcccactacagaagtcctattggctgggcagtgggcggacagagacctgggagtggagctggccatgggcacacgcaccacgcctcagcgttatggaggaggaccaggcctgtgccatggagagccggcacttcgaggagactcgcggtatggaggaggagcccacccacctgcctttggtcgtctgcgtggacaagctcaccaaggtctataaaaatgacaagaagctggccttaaacaaactgagcctcaatctctacgagaaccaggtggtctctttcctaggccataacggggctggcaagaccactaccatgtctatcctgactggactgttcccacccacgtcgggctcagccactatctatggccacgacatccgcacagagatggatgagatccgtaagaacctgggcatgtgcccacagcacaacgtgctctttgaccagctcactgtggaggaacacctctggttctactcacgcctcaaaagcatggcacaagaggagatccgcaaagagatggacaagatgatcgaggacctggagctctccaacaagcgccactcgctggtacagacgctgtctggaggcatgaagcgcaagctttcagtagccattgccttcgtgggtggctctagagccattatcttagatgagcccacagctggcgtggacccctatgctcgacgtgccatctgggacctcattctgaagtacaagccgggtcgcactatcctcctgtccacccatcacatggatgaggccgacctgctgggggaccgcattgccatcatctcccatgggaagctcaaatgctgcggctctcccctcttcctcaagggtgcctacggcgatggctaccgcctcacactggtcaagcggcctgcggagcctggcacctcccaagagccagggatggcttccagcccctcaggtcgtcctcagctgagcaactgctcagagatgcaagtgtcccagttcatccgcaagcatgtggcttcctccctgctggtgtcagacacgagcaccgagctctcctacatcctgcccagcgaggctgtcaagaaaggggccttcgagcgcctctttcagcaattggagcacagcctggacgcactgcatctgagcagttttgggctgatggacacaaccctggaggaggtgttcctcaaggtgtctgaagaagaccagtcactggagaatagtgaggccgatgtgaaggagtcccggaaggatgcactgcctggggcagagggcctgacggctgtggagagtcaagcaggcaacctggctcggtgctcagagctggcacagtcccaggcttcactgcagtctgcatcttctgtgggctccgcccgtggggatgagggtgctggctacaccgacggctacggtgactaccgtcccctctttgacaacttgcaggacccagacagtgtcagcttacaagaggctgaaatggaggccctggctcgggtaggccagggcagccgcaagctagagggctggtggctgaagatgcggcagttccatgggctcctggtgaagcgcttccactgtgctcgccggaactccaaagcgctctgctcccagattctgctgcctgccttcttcgtctgtgtggccatgactgtggcattgtctgtccctgagatcggtgacctgcctccactggtcctgtcgccttctcagtaccacaactatacccagccccgtggcaactttatcccctatgccaatgaggaacgccgcgagtaccgattacggctgtcacctgatgccagcccccagcagttggtgagcacattccggctgccctctggtgtgggtgccacttgtgtgctcaagtctccagccaacggctccctggggcccatgctgaacttgagcagtggagagtcccgcctgctggccgcacggttcttcgacagtatgtgcctggagtccttcacacaggggctgccactgtccaacttcgtgccacccccaccctcgcccgccccttccgactcacccctgtccccggatgaggattcactgctagcctggaatacgtccctgccccctactgctggaccagagacgtggacgtgggcgccttctctgccacgcctggttcacgagccggtccgctgtacctgctctgcacagggcacgggcttctcgtgccccagcagtgtgggtgggcacccaccccagatgagagtggtcacgggggacatcctgactgacatcaccggccacaatgtttccgagtacctgctcttcacctctgaccgtttccgactgcaccgctatggagccatcacctttggtaatatccagaagtccatcccagcacccattggtacccggacccctctcatggtccggaagattgcagtgcggagggtggcccaggtgctctacaacaacaagggctaccacagcatgcccacctacctcaacagcctcaacaatgccattctgcgtgcaaacctacccaaaagcaagggcaatccagcagcctacggtatcaccgtcaccaaccaccccatgaacaagaccagtgctagcctctccctggattacctactgcagggcacagacgtggtcatcgccatcttcatcattgtggccatgtccttcgtgccggccagcttcgtggtcttccttgtggccgagaaatccaccaaggccaaacacctgcagttcgtcagcgggtgcaaccctgtcatctactggctagccaactacgtgtgggacatgctcaattacctggtcccggccacctgctgcatcatcatcctcttcgtgtttgacttgccggcctacacgtcacccaccaacttccccgcggtgctctccttgttcctgctctatggatggtccatcacacccatcatgtacccggcctccttctggtttgaggtccctagctcagcctacgtgttcctcatcgtcatcaacctcttcattggcatcacggccacagtggccaccttccttctgcagctctttgagcatgacaaggatctgaaggttgtcaacagttacctgaaaagctgcttcctcatcttccccaactacaacctgggccacggactcatggagatagcctacaacgaatacatcaacgaatactatgccaagatcggccagtttgacaagatgaagtccccgtttgagtgggacattgtcacacgtggactggtggccatgacagtcgagggcttcgtgggattctttctcaccatcatgtgtcaatataacttcctacggcagccacagcgtctgcctgtgtctactaaacctgtggaagacgatgtagacgtggccagtgagcggcaaagagtgctccgtggcgatgctgacaatgacatggtcaagatcgagaacctgactaaggtgtacaagtctcggaagatcggccgcatcctggcagtggaccgcctttgcctgggtgtgcgccccggagagtgctttgggctcctcggggtcaatggtgccgggaagaccagcaccttcaagatgttgactggagatgagagcacaacagggggcgaggcctttgtcaatggacacagtgtgctcaaggacctgctccaggttcagcagagccttggctactgcccacagttcgacgccctgttcgatgagctcacggctcgcgaacacctgcagctgtatactcggcttcgaggcatcccctggaaggatgaggcgcaggtggtgaggtgggccctggagaagctggagctgacgaagtgtgcagacaagccagccggtagctacagtgggggcaacaaacggaaactttccacagccatcgctctcattgggtaccctgccttcatctttctagacgagcccaccactggcatggaccctaaggcccggcgcttcctgtggaacctcattctggacctcatcaagacaggacgttcagtggtgctgacctcacacagcatggaggaatgcgaggctgtgtgcacacggctggccatcatggtgaatggacggctgcgctgcctggggagtatccagcacctcaagaacaggtttggggacggctacatgatcactgtaaggaccaaaagcagccagaacgtgaaggatgtggtgcggttcttcaaccggaacttcccagaggccatgctcaaggaacgccaccatacgaaggtgcagtatcagctcaagtcggagcacatctcgctggctcaggtgttcagcaagatggagcacgtggtcggtgtactgggcatcgaggactactcagtcagccagaccactctggataacgtgtttgtgaacttcgccaagaagcaaagtgacaatgtggagcagcaagaggctgagccatccaccttgccgtccccccttggactacttagcctgctgcggccccgccctgcacccacagagctccgggcactggtggccgatgagcctgaggacctggacacggaggacgagggcctcatcagcttcgaggaagagcgggcccagctctccttcaacaccgatacgctctgctgacgttcaagagtcacatcagggatgcagctgtttggggcagaagtcaggcggtggccgtagccccagtcacacatgccaggccctggaaaggcaggttcaggaccaaagggctcccgccctcctcccaactaccatcctccccgatcgtgccaaaggctgggctggccctgggctgcacacaccctcaccctgctttgccttaaagccttgggtcctggcccagccccttaccctgcccagcaccatccaccttcccagggtgacatgggctgccccaagtatcctgtgacccttctctgcagcggccaccagtctacccaggccagcatcttgcacagatgtctttcatgaaaagactgcagttggggaggtggcagcttgcctacttattttgctttaagagcctccctcactctgctgttgtgaagaagttaggctaccatgggaagccatgaatgtggctgcctcagccctggtggaatggcaggaacggagaagctgggcttgctggctaggtgaggggccactgctccctccctgccccctcaagctgcctttgctctcccgctcagcttggcccttcctgccacccatgtgggagtaggaccttgtatatagcacacagatgtttgttttcaataaataagcaaaaaggaaaaaaaaaaaaa

SEQ ID NO: 170 - DNA, 4878 bp, Rattus norvegicus
  Genbank Accession No. NM_024400
ctgtcactaggcctgagcgcacagcccggcggagagagcagatccttgctcagtatccagccctatcgcggccaaggcggaggacgaagagtccaggctcttattctggacttgttccccaattccagggcgcttctcgatcctgcagcagcctcttagcagctccagcagtgcggagccattaactcggtgctggaataaaaaaaattcccgcgcgccggcgcagcctttttctaagtgacccggagcttttggctgcgagctctgcaagaactttcaaatcaaagtgcttgtgaattttaagcatccggagcaggccaacgaagctctgcgcgtctaaccgtctaaccgtctaaccagaacaagagttctctgcgctgcagtgtgcggtgtcatgcagccagaagtccctttggggtcaggcaagctgaagccctgctcagacatgggggacatccagcgggcagcgaagtttcggagctctcagtctgcacacatgctgttgctactcctcgcttccataacaatgctgctgtgtgtgcggggcgcacacgggcgccccacggaggaagacgaggagctggtgctgccctcgctggagcgcgcccggggccacgattccaccacactcctccgtctggacgcctttggtcagcagctgcatctgaagttgcagccagacagcggtttcttagcgcctggcttcaccctccagacggtggggcgcagtcctgggtccgaggcacagcatctggaccccactggggacctggcccactgcttctactctggcacggtgaacggtgaccccagctccgccgccgccctcagcctctgtgaaggtgtgcgcggtgccttctacctacaaggcgaggagttcttcattcagccagcgcctgcggtggccaccgagcgcctggtccccgccgaaccgaaggaggagtcaatcgcacctccgcggttccacatcctgaggcgaaggcggcggggcagcggcggcgcaaagtgcggtgtcatggacgaagagaccctgccaaccagcaactcgggtcgcgaaagccagaacaccccggaccagtggcctctgcggaaccccactcctcagggcgcgggaaagccaacaggaccaggaagcataaggaagaagcgatttgtgtccagcccccgttatgtggaaaccatgctcgtggctgaccagtccatggctgacttccacggcagcggtctaaagcattaccttctaaccctgttctcggtggcagccagattttacaagcaccccagcattaggaattcaattagtctggtggtggtgaagatcttggtcatatatgaggagcagaagggaccggaagttacttccaatgccgctctcacccttaggaatttctgtagctggcagaaacagcacaacagccccagtgaccgggatccagagcactatgacacagcgattctgttcaccagacaggatttatgtggctcccacacctgtgacactctcgggatggctgatgttggaactgtatgtgaccccagcaggagctgttcggtcatcgaagatgatggtttacaggctgccttcaccacagcccatgaattgggccatgtgtttaacatgccacacgatgacgccaagcactgcgccagctttaatggcgtgagtggggattcccatctgatggcctcgatgctctccagcttggaccacagccagccctggtctccttgcagtgcctacatggtcacatcattcctggacaacggccatggggaatgtttgatggacaagccgcagaacccaatcaagctcccatctgatcttcccggtaccttgtacgatgccaaccgccagtgtcagtttaccttcggggaggaatccacgcactgccctgatgcagccagcacatgcagtaccctgtggtgcactggcacctccggtggcttactggtgtgccaaacaaaacacttcccttgggcagatggcaccagctgcggagaagggaaatggtgtgtcagcggcaagtgtgtgaacaagaccgacatgaagcactttgctactcctgttcatgggagctggggaccgtggggaccatggggagactgctcaagaacctgtggtggaggagttcaatatacaatgagagaatgtgacaacccggtcccaaagaacggggggaagtactgcgaaggcaaacgagtccgctacaggtcctgtaacattgaggactgtccagacaataacggaaaaacattcagagaggagcaatgcgaggcgcacaatgagttttccaaagcttcctttgggaatgaacccacggtggaatggacacccaagtatgctggcgtctcgccaaaggacaggtgcaagcttacctgcgaagccaaaggcattggctacttctttgttttacagcccaaggtggtagatggcactccctgtagtccagactctacttctgtctgtgtgcaaggacagtgtgtgaaagctggctgtgatcgcatcatagactccaaaaagaagttcgataagtgtggcgtttgtggaggaaatggctccacgtgcaagaaaatatcaggaacggtcactagtacaagacctgggtatcatgacattgtcacaattcctgctggagccaccaacattgaagtgaaacatcgtaatccaaggggatccagaaacaatggcagctttctggctattagagctgcagatggtacctatattctgaatggaaacttcactctgtccactctagagcaagacctcacctacaaaggtactgtcttaagatacagtggttcctcagcagcattggaaagaatccgcagctttagtccactcaaagaacccctgaccatccaggttcttatggtgggccatgctctccgacccaaaatcaagtacacctattttatgaagaagaagacggagcccttcaacgctattcccacattttcggagtgggtgattgaagagtggggggagtgctccaagacatgtggttccggttggcagaggagagtggtagagtgcagagacattaatggacaccctgcttctgaatgtgccaaagaagtgaagccagccagtaccagaccttgtgcagaccttccttgcccacgttggcaggtgggggattggtcaccatgttctaaaacttgtgggaagggttataagaagagaaccttgaaatgtctgtcccatgatggcggtgtgttatcaaatgagagctgtgatcctttgaagaaaccaaagcattacattgacttttgcatactgacacagtgcagttaagaggttttgaggacaaggtagcgtgggagggctgatacactgaaagcaagagtgctggagggatcctgtgaatcaaaccagtaaacagtgaggtgtggcaatgaggtgtgtataggggatacattagcaaaagaggtagatccgtacactatcctgccagttaacttctgatagggtagttaatgaggaatagtagcatctgaaagatcatacatagcactatgaagccccaaagtactattagtattccttttgttacatccactgcacaaataattttcagagtctggcagaagcatggctaccctgttgcatggtactaattaatactttgtatcacaggggttgggaaaggaaagcagaagaatggtaagattggatttcaaacatggcttacttttttatcactggaggcagggagaagggtacaaacaagatcattattcaaagtttctggctgccgtggtttcagggaaggttgattcctatcaagagtgaaaagttctgattgctcaacatgagagagagaaagcctcgtctctgtgaaataactcttgatttcttcttagaccatctccgttttttaaccataattcctgttgaggtagtaacaattcacctacttataaaatgtacattgggtgggaaaaagtgaagtataagagttacacataaaaactcaaggaataagcaacatggctcctgctttgctttctcctaaggttagcctgcctgggatctgtggacgttaaagataatccttgactcacaaaaggcagtaaaaccatacatgtcatgcaagagtaagaatgggctatagagatcagggtcccatgagatgggggacacggaggtcactcatctcacatgggagactgctgcaggatagcaggtccactcctggcagctggtccaacagtcgtatcctggtgaatgtctgttcagctcttttactgagagagaatatgactgtttccatatgtatatagtaaaatacattactatgatttatatgtactttataagtattggtttgtttgttccttctaagaaggactatagtttataataaatgcctataacatatttatttttatacatttatttctaatgataaaaccttttaagttatatcgcttttgttaaagtgcatataaagatagagtatttatacaatatatgttaactagaaataataaaagaacacttttgaatgtgtttgcctattttctgaagtgggcttaactcctgggcaagaaatctaatgagacacaagcattggatttcaggacagctttaaaatctgggtgaatgaactgtatttcctgtttatagacatactaataaaaaagaagttgatgatgtctttagtgataagattgttactaacgtggttggcaaattactgtaaagagtcagatagtaagcgtttatggcattgtaggctatatttcctgccacaaccctgtgacagtgaatgctttgtaggaatgagagcagccataaatgacatgtacaccatagctgtgctttaataaaaccttatttgcaaaaaaaaaaaaaaaaaaaaaaaaaaaaaa

SEQ ID NO: 171 - DNA, 1173 bp, Rattus norvegicus
  Genbank Accession No. NM_024403
tcgagttaagcacattcctcgataccagcaaatccctacaacatgaccgagatgagcttcctgaacagcgaagtgttggcgggggacttaatgtcccccttcgaccagtcgggtttgggggctgaagaaagcctaggtctcttagatgactatctggaggtggccaagcacttcaaacctcatgggttctccagcgacaaggcgggctcctcagaatggctggctatggatgggttggtcagtgcctcagacaccggcaaggaggatgccttttccgggacagattggatgttggagaaaatggacctgaaagagtttgacttcgatgctctgtttcgaatggatgacctggaaaccatgccagatgagcttttggccacgttggatgacacatgtgatctttttgcccctctagtccaagagactaataaggagccccctcagacagtgaacccaattggccatctcccagaaagtgtaataaaagtcgaccaggctgccccctttacattcttgcagcctcttccctgttccccagggtttctgtcttccactccagatcattcctttagtttagagctgggaagtgaggttgatatctctgaaggagataggaagcctgactctgctgcttatattactctaacccctcagtgtgtaaaggaggaagacactccctctgatagtgacagtggcatctgtatgagccctgagtcctacctgggctctccccaacacagcccttccacctccagggccccaccagacagtctgccttctccaggtgttcctcgtggttctcgacccaaaccttatgacccacctggagttagtgtgacagctaaagtgaagactgaaaagttggataagaagctgaaaaagatggagcaaaacaagacagcagctactaggtaccgccagaagaagagggctgagcaggaagccctcactggcgagtgtaaagagctagaaaagaagaacgaggctctgaaagagaaggcagattctctcgccaaagagattcagtatctaaaagacctgatagaagaggtccgtaaggcaagggggaagaagagagttccttaatagggtagtcaggtgctttgtgcttgtacatagtcttgtgatgctgtgtttgctgtaataaattattttgtagtgaaagtaaaaaaa

SEQ ID NO: 172 - DNA, 1865 bp, Rattus norvegicus
  Genbank Accession No. NM_024488
cggcacgagctgaattgaggctcaggcacgccggctcaggattggtgctgggccgggccggggtctttggccggaagtggaaaaaggatgcaggaccatcagcacgtgcccatcgacatccagaccagcaagctgctcgattggctggtggacagaagacactgcaacttaaaatggcaaagcctggtgctgaccatccgggaaaagatcaacaccgccatccaggacatgccagagagccaagagattgcccagctgctctctggttcctacatccactacttccactgcctaagaatagtggaccttcttaaaggtaccgaggcttccaccaaaaatatttttggccgctactcttcacagcggatgaaggattggcaggagatcataagcctgtatgagaaggacaacacctatttagtggaactctctagcctcctggttcggaatgtcaactatgagatcccctctctgaagaagcagattgccaagtgccagcaactgcagcaagactacagccgcaaggaggaggagggccaggctggggctgctgagatgcgagagcagttctaccactcctgcaaacagtacggcatcacgggagacaatgtccgacgagagcttctggccctggtgaaggacctgccaagtcagctggctgagataggagcgggagctcagtccctgggggaagccatcgacctgtaccaggcctgtgtggagtttgtatgtgacagccccacagagcaggtgctgcccatgctgcggtacgttcagccgaagggaaactccacggtgtatgagtggaggacagggacagagccctctgtggtagagcggccacaactggaggaccctcccgagcaggtgcaagaagacgagatcgactggggcgactttggcctggaggctgtttctgactctggaaacatcatctctgctgagacccctgggatagactggggtatctccctggagtcagagtccaaggatgctggggctgacaagatagactggggtgacaatgctgttgcttcggagatcaccgtgctggagacaggaacggaggctccagagggtgttgctaggggctcagacgctctgactctccttgaataccctgagactcggaatcagttcatcgatgagctcatggagcttgagatcttcttgtctcagagagcagtagagatgagtgaggaggctgacatcctgtccgtgagccagttccagctggctcctgccatccttcagggccagaccaaggagaagatgctcagcctggtgtccacactgcagcatctgattggccagctcaccagtctggacctgcagcacctgtttatgattctggcctcaccgaggtatgtggaccgggtgacagagctcctccagcagaagctgaagcagtcccagctgttggctctgaagaaggacctgatggtggagaagcagcaggaggcgcttcaggagcaggcagcgctggagcccaagctggacctgctgctggagaagaccagagagctgcagaagctgattgaagctgacatctccaagagatacaacggccgtcctgtgaacctgatggggacctctgtgtgacgtgctggccctgtgtccgccaccagcggcctggtgggggtggacagcccaggctggtattgctggacctcaccagcaagaagccagcagaggtggagcagagccacaaggaagcacctgagtggtggcaccagcattcattgtgacctatgcaagaagtctgagtggctctgtggatctaagcctaaggcacagttgcttcttctggttatcaaggaaggcttaataaaaaaaggaagtgactcctcaaaaaaaaaaaaaaa

SEQ ID NO: 173 - DNA, 5042 bp, Rattus norvegicus
  Genbank Accession No. NM_030836
cggcggtgctgaaggtaatttgagcaagaaggtggtgtcctcaaatagtcacttgcaagcatgccctctcttctttccctagtattgacctttttagctgtgtcttctccttcttgttgtcagaacagtgacacagcatctccaaaagctagtaatggggcctcattcccttggaataatatgcgacttcctgagtatatcaccccaattcattatgatctcatgatccatgcaaaccttagcactctgactttctgggggaaaacagaagtagaaatcacagttagccagcccaccagcaccattatcatgcatagtcaccagctgcaaatatctaaggccaccctcaggagaggagctgaagagatgctgcctgaagaaccactgaagctcatggaatattctgctcatgagcaagttgcactgctgactgcccagccgctccttgctgggtccgtgtacacagttatcatcacctatgctgccaacctgtctgagaatttccatggattctataaaagcacctacagaacacaggagggggaaaggagaatacttgcagcaacacagtttgaacccacagctgctagaatggcttttccctgctttgatgagcctgccctcaaggcaagtttttccatcaagataaagagggatccaaggcacctggccatctccaacatgcccttggtgaaatctgtgactgttgctgaaggactcatagaagaccattttgacatcactgtgaaaatgagcacctaccttgtggccttcattatttctgattttaagtctgtgagcaagatgactaagagtggagtcaaggtctctgtgtatgctgtgccagacaagataaatcaagcagattatgctctggatgctgcagtgactcttctagagttttatgaggattatttcagcattccatatcctttacccaagcaagatcttgctgcaattccagactttcagtctggtgctatggaaaactggggcctgaccacatacagagaatctgctttgttatatgataaagaaaagtcttctgcatccagtaagcttggcatcacaatgactgtatcccatgaactggctcaccagtggttcgggaacttggtcacaatggaatggtggaatgacctttggctcaatgaaggatttgccaaatttatggagtttgtgtctgtcactgtgacccatcctgaattaaaagttgaagaatatttttttggcaagtgttttaatgcaatggaagttgatgcattaaactcctctcaccctgtatccacacctgtggagaatcctgcacagattcgggagatgtttgatgaggtttcttatgaaaagggtgcttgtattctgaatatgctaagagattatctgagtgcagatacatttaaaagaggaattgtacagtatcttcaaaagtatagttataaaaacacgaaaaatgaggacctgtggaatagcatgatgcatatttgtcccacagatggcacacaaacaatggatggcttttgctctaggaaccaacactcatcatcaacctcacactggcgtcaggaggttatagatataaagagcatgatgaacacatggacactgcagaagggctttcctctgataaccatcactgtaagagggcggaatgtgcacttgaagcaagaacactacatgaaaggttctgaatgcttcccagagactgggtctctgtggcatgttccgctgacattcattaccagcaaatcagattcagtccagagatttttgctgaagacaaagacagatgtgatcatcctcccagaagcagtggaatggatcaaatttaatgtaggaatgaatggctattacattgtgcattacggggatgatggatgggcttctctgaatggcctcttaaaagaagcacatacaacaatcagcagtaatgatcgggcaagtctcatcaacaatgcatttcagctggtcagcatcggaaagttatcaattgaaaaagccctggatttaatcctgtacttgaaaaatgaaactgaaattatgcccatattccaaggtttgaatgaactgatacctatgtataagttaatggagaaaagagatatggttgaggtggaaactcaattcaaggactttctcctcaggctgctaaaggaccttattaataagcagacctggacagatgaaggctctgtctcagagaggatgctcaggagccagctcttactcctagcatgtgtgcacaggtatcagctctgcgtgcagagggcagagcgctatttcagagagtggaaggcatccaatggaaacatgagcctccctattgatgtgaccttggcggtgtttgctgttggggcccagaacacagaaggctgggattttctttatagtaaatatcagtcttctttgtctagtaccgagaaaagccaaattgaattttccctctgcataagccaagacccagaaaaacttcagtggcttctagaccaaagttttaagggagagataataaaaactcaggaattcccacatattctcacgctcattggcagaaacccagtgggttatccattggcctggaagtttctgaaggaaaattggaacaagattgtacagaaatttgaacttggctcatcatccatagctcacatggtaatgggaacaacaaaccagttttccaccagagcacgtcttgaagaggtaaaggggtgtatgtgagagaaattctcttttaaacttgagtgacagttagctactaaatatgggcaggaacaaaagctgtggcacactgagaatgaatcttgtcatttggatgcaacttttgagttccagtgtatatgctctcatgtgacaagctttatttctcaattaaaaacttggacattgccaggcatgatagcgtgttttaaatccatgcactctggaggcagcagcaggcagatacctgtgagttaaaggtcaagttggtttacaaagcaagtttcaggtcagtcaagactaaatagtaacattctgtcaccaaaaagaaggaaaacaaaacaaaacaaaacaaaccaacaaaaaaaccttcagcttaaaactactaccaccaccaccaacaacaacaacaacaacacaattggttttcatttaaagatgttaaaagtgaatgttagaggtttgaacacctgatgtgaccagctatggtggaagaggcagagagggtccaggtgctttagtatccaaagttatatttttcttctcacttataatattctatactttatgagtttttgggaatctataaaaatctaactgtgaaataaatattaaagaatgaaaactgtttagaaggtaggagtatgaggacttacactgaagaggtttattacaatgacattgaacaattaatgtacagttcttattgctcaggcaaaaattagaaattgatatgaaactagctggtaagagggaccacgaccgtacatgtgtcctacaaaagaagactttcttcctctcctctcaaggctgctgagtatgttcttagcgatgtgtatataagacaggtattcagctgtattgatgtggcagaagacaccatctatggttggggaaaatgttaagagctggctttgctagagtttgtatggaagttcataattcagccttaatatcacaatgggctccataaggataaatgaaatattttagccaaaaacgaagcaaaaatattgatgtctcattgttgaagagagccgaaagtgatttttagttgataaggaatcaatcttgcagcaggatactgagcaaggtggggcagggaggagggtatgtctcctctcttccccagtaggaggcaaccaggctctcaagtaattttagaacaactctgcatctttcctgatggaacttgaccttcataaaactcaatcttgcccccacccactatttcagaactcataacatgatattatgaaatgaaattttgaggaattagctgtctggaattcatgaccaataatgtcttggcctgttcttactttctgtctataaaaaaaatgggttagtgctgtgaaaatttatgggttgatgttgactactcttgaaggtgaaacgaaatagtacagttttctgtgctttgacaaaggcagcctatccatcattcaagcttaaaggttcagatggatgcccagggatttgacaagaacaaaatacattttgaggagagtgctgcaagtcttctaaatctctggaactgtgggaaactgtagattttatctggagggaacaaagcaggaattgtggattagggtaaaaatattgtcaaggtttgagatcttaccaacatagtttgttaagagccccattccttacagtgttggcagtaataacacacaaggtcaggcttcacagaaagactgcatttatgtagttgatatgatttttttcttggcaaagaaggtattctgcacattctgcctttcagatataatttttaaaaactttagtctacatccgtgtatatataatagaacccatattaaatagaaacacttaataaacctcaaatataaattggtaaacagcaaaaccttttaaagtctggcaattgtgaatatataaaaagctagaggaagaaatacaaacctgatatcatgtgacatgagttcattttgtatagctcaaacataagatataccagatatctggtattttcttctatgtagaatgttagcttatgttggaattgtagcttttcttttaattggccttaacttaccatttgtttaatataaccaaactaatgcttttaaagtctacttttttcccccaaggtaaaaggattcttcagctccttgaaaaaaaatggttctcagctccgttgtgttcaacaaaccattgaaaccattgaagaaaacatacgatggatggataaaaattttgataaaataagactgtggcttcaaaaagaaaggcaggagttgctgtgacaatttgtttcataccaagttcctgaatttataattagtaaaattttcttcaatttgaaaaaaaaaaaaaaaaaa

SEQ ID NO: 174 - DNA, 929 bp, Rattus norvegicus
  Genbank Accession No. NM_030845
cctaaaccagctccagcactccagactccagccacactccaacagagcaccatggtctcagccacccgctcgcttctctgtgcagcgctgcctgtgctggccaccagccgccaagccacaggggcgcccgtcgccaatgagctgcgctgtcagtgcctgcagacagtggcagggattcacttcaagaacatccagagtttgaaggtgatgccgccaggaccccactgcacccaaaccgaagtcatagccacactcaagaatggtcgcgaggcttgccttgaccctgaagcccccatggttcagaagattgtccaaaagatgctaaagggtgtccccaagtaatggagaaagaagatagattgcaccgatggcgtctgtctggtgaacgctggcttctgacaacactagttttacacattttacgatttctattgagggtcctatttattttatgtatttatttattccaccaagtgtgtggtttttattttacattaatatttaacgatgtggatgcgtttcatcgatggtcgttcaattccaattgtgcagtttaaagatggtaggcgttaaatatctcgttaaattaatatttattgggagaccattaggtgtcaaccactgtgctagaaggtgttgagcgggaagaagggcggagagatgagagtctgggatcgtgttttgtgttagggtgaggaatgtgtgagaggctatgttgtatgttttgaaagaatgttatttattgaaagttgtctttcatattttatggtcaacattgatgtgttgaagcttcccttggacattttatgtctagtttgtagggcacaatgccttttatattctttaaccaatgctccttctcgtctcaggacagagaagttcaaaggactgttacaaatgaaataaaaataaaagttttattaaaaaat

SEQ ID NO: 175 - DNA, 1966 bp, Rattus norvegicus
  Genbank Accession No. NM_030873
atggccggttggcagagctacgtggataacctgatgtgcgatggctgctgccaggaggccgccattgtcggctactgcgacgccaaatacgtctgggcagccacggccgggggcgtcttccagagcatcacgccagcagaaatagatgtgattataggaaaagaccgggaaggtttctttaccaatggtttgactcttggaggaaagaagtgctctgtgatcagagatagcctatacgttgactcggactgcacaatggacatccggacaaagagtcaaggtggggagccaacatacaacgttgctgttggcagagctgggagagtcttggtctttgtaatgggaaaagaaggggtccatggaggcggattgaataagaaggcatactcaatggcaaaatacttgagagactcttgggttctagctgctaggcagactgttaagtattaggggaaattgctcttaaattttcctagctgtaagcttaagtcttaattctggaaattttattagcaatgcagggtgatgggatatgaacctgtgtctcctttgtatccctctgttggtggggaaaggtgtctgtctttcttccccttccccttaaataattctgttcatttttggttgtttccttgtgtactccagcattggttatagttatgggaaaggaaggtgtccacacaggcacaattaacaagaaaacatatgaactcgctttatacctgaagaggtctgatgtataagcagcctctcccatctacctacctatcaactgtcttcatcaccaccctaattatggtcataatgctaccagattgtagatggtagctagtttttccttccttattttctactgtcatgattcccaagggtcatttgtatgttagccactgtgtgcccaacccttatctggcatcgtgatcgcagcacaataatgatttgcatgatatcttgagattgggggaagggggcatgccaagtcgggcatcacttcgtcttagcaattagtggaatactgattactaaaataagttaatattaagcaaggtgccggtgtacaatctctaatttgatcagtgttttctcagcactttgagcatttacttagctcatttagtcttccttttgtagcgcatggttgggaggaaaaagtgcatgcatctgtacttcacacctttctcatcccctcccttcgaacatgaggcgtttggtttgcttccattctctttgtgtagtgcctggtttatttaacctaatcaatacctcctcgctgagctgtgagagtcgcagtgatttactttgatacagtgattgcacttgggacacactgtttgtagtgtcaatagcacgtgatgagtgcagctgtggagagaaaggcacttcctcccatgaccttactacagtaaccataccgatcaaattcccagggacattcgatcattgcagtagctcagacttcttgtcttttctttgcacaccagctgtactcttgagtaaaattgtaaaaggctgccattatggatattaggtaacccaacataaccatctggagtgtgtccagtttatttttcataggaccaatttttatttgcagcttaggtttttatatgaagttgcattattgtggacttggctgtcttgtgatgtatttttttcatatgtatcctgtgccatactattgttaaaatgaactgttgctattgtgagatggaatttctttcgaatggcactactttagggacattctagtatttgcttctattgtttgggcattgtggataatgtacagatttaaaaacaaatcttgttgctgatttgtccatttctttccctgcactttgttacatctgggatacagtctaactcatctgatttaatatgcatttaaaaaaatgccataactattaaacaccttgtttacagacagatgaaataaatttattccaaccaaaaaaaaaaaaaaaaa

SEQ ID NO: 176 - DNA, 1124 bp, Rattus norvegicus
  Genbank Accession No. NM_031000
gaattctggccactttgtcttctccacagcctgtgctcattgccaaggggacaatgacggcctccagtgtcctcctgcacactggacagaagatgcctctgattggtctggggacatggaagagtgagcctggtcaggtgaaagcagctattaaatatgcccttagcgtaggctaccgccacattgactgtgcttctgtatatggcaatgaaactgagattggagaggccctgaaggagagtgtgggagcaggcaaggcagtacctcgagaggagctgtttgtgacctccaagctgtggaatactaagcaccaccctgaggatgtagaacctgctgtccggaagacgctggctgatctgcagctggagtatttggacctctatttgatgcattggccttatgccttcgagcggggagacaatccctttcccaagaatgccgatggaactgtcaaatatgactccactcactataaggagacctggaaggctctggaggcactggtggcaaaggggctggtgaaagccttgggcttgtccaacttcagcagtcggcagatagatgatgtcctcagtgtggcctcggtgcgcccagctgtcttgcaggtggaatgccatccatacctggctcaaaatgagctcattgcccactgtcaagcacgaggcttggaggtgacagcttacagccccttgggttcatcggatcgtgcttggcgccaccctgatgagccagtcctgcttgaggaaccagttgtcttggcactagctgaaaaacatggccgatctccagctcagatcttgctcagatggcaggttcagcggaaagtaatctgcatccccaaaagcatcactccttcccgcatccttcagaacattcaggtatttgatttcacctttagtccagaggagatgaagcaattagatgctctgaacaaaaattggcggtatattgtgcccatgattacggtggatgggaagagagtccccagagatgctggacaccctctgtatccctttaatgacccatactgaggcccgtagtttctcagcttccctttcagttctcctgctaagcattgcctgctactcccaagaaagaaggactcaataaagccattgaagtgt

SEQ ID NO: 177 - DNA, 2956 bp, Rattus norvegicus
  Genbank Accession No. NM_031005
gaattcggcacgaggtcagcagcaacctcctcgagcagagccgcggcggaagcgggctcaggggagcgagcccggccccgccagcccagcccagcccagcccagcccagcccaaccctgccgactccctccccacgcccgggtagcagccgccgtcgcctggagagaaggtggagaaagaaatctagcccctagcacgcacgcaccatcatggaccattatgattcccagcagaccaatgactatatgcagcctgaagaggactgggaccgggacctgctcctggatccggcctgggagaagcagcagagaaagaccttcacggcctggtgcaactcccacctgcgcaaagcagggacccagattgagaacattgaagaggacttccgagatggcctgaagctcatgctgctcctggaggtcatctcaggtgagcgtttggccaagccagagagaggcaagatgcgagtgcacaagatctccaacgtcaacaaggccctggatttcatagccagcaaaggggtcaagctggtgtccattggagctgaagaaattgtggacgggaatgtgaagatgaccctgggcatgatctggaccatcatccttcgttttgccatccaagacatctctgtggaagagacatcagctaaagaagggttgctcctgtggtgtcagaggaagacagccccatataaaaatgtcaacatccaaaacttccacatcagttggaaggatggtcttggtttctgtgccttgatccaccggcaccggcccgagttgattgactatggaaagcttcgaaaggatgatccactcacaaacctgaacacagcctttgatgtggcagagagatacctggacattccaaagatgctggatgcagaagacatcgtcggaactgcccggccagatgagaaagccattatgacctatgtgtctagcttctaccatgccttctctggagcccagaaggcggaaacagcagccaatcgcatctgtaaagtgttggccgtcaatcaagagaatgaacagcttatggaagactatgagaagctggccagtgatctgttagagtggatccgccgcaccatcccatggctggagaatcgggtgcccgagaacaccatgcaggccatgcagcagaagctggaggacttccgagactaccgacgcctgcacaagccgcccaaggtgcaggagaagtgccagctggagatcaacttcaacacactgcagaccaagctgcggctaagcaaccggcctgccttcatgccctccgagggcaggatggtctcggatatcaacaatgcctggggctgcctggaacaggcagagaagggctacgaggagtggttgctgaatgagatccggaggctagagaggttggaccacctggcagagaagttccggcagaaggcctccatccatgaagcctggacagacggcaaagaagccatgctgcggcagaaggattatgagacggccaccttgtccgagatcaaggccctactcaagaagcacgaggcctttgagagtgacctggctgcccaccaggaccgcgtggagcagatcgcggccattgcccaggagcttaatgagctggactattatgactcaccaagtgtcaacgctcgatgccaaaagatctgtgaccagtgggacaatctaggggccctgactcagaagcggagggaagctttagagcgaacagagaagctgctggagaccatcgaccagctatacttggagtacgccaagagggctgcacccttcaacaactggatggagggagccatggaggaccttcaagacaccttcatcgtacataccattgaggagatccagggactgaccacagcccatgagcagttcaaggctaccctcccggatgcagacaaggagcgcctggccatcctgggcatccacaatgaagtgtccaagattgtccagacctatcatgtcaacatggcaggcaccaacccctatacaaccatcacacctcaggagatcaatggcaaatgggaccatgtacggcagctggtgccccggagggaccaggctctaacagaggagcactcgaggcagcagcacaacgagaggttacgcaagcagtttggggcacaagccaatgtcatcggaccctggatccagaccaagatggaggagattgggaggatctccattgagatgcacggtaccctggaggaccaactcagccacctgcggcagtatgaaaagagcatcgtcaattataagccaaagattgaccagctggagggcgaccaccagctcatccaggaagcacttatcttcgacaataagcacaccaactacacaatggagcacatccgtgtgggctgggagcagctgctcaccaccattgccaggaccatcaatgaagtggagaaccagatcttgacccgggatgccaaaggcatcagccaggaacagatgaacgaattccgggcctccttcaaccactttgaccgggatcactccggcacgttgggtcccgaagagttcaaagcctgcctcatcagcttgggttatgatattggcaacgacccccagggagaggcagaatttgcccggatcatgagcattgtagaccccaaccgcttgggggtagtgacattccaggccttcatcgacttcatgtcccgagagacggctgacacagatacagcggatcaggtcatggcttccttcaagatcctggctggagataagaattacatcaccggggatgagctgcgccgcgagctgccacctgaccaagccgagtactgcatcgcgagaatggccccctacgcgggccctgactccgtgccgggtgctctagactacatgtccttctccacggcgctgtacggcgagagtgacctctaacccacccctgcctccccccaccctggccttctgcgcgtgcgccccaccctgctcctgctccgcccagt

SEQ ID NO: 178 - DNA, 2048 bp, Rattus norvegicus
  Genbank Accession No. NM_031010
gggagaaatcatctgcaagatgggtgtctaccgcatccgcgtctccaccggagactccaagtacgcgggctccaacaacgaggtctacctgtggttggttggacagcatggagaggcatctctcgggaagctgctacgaccctgtcgggactcggaagcagaattcaaagtggatgtgtcagaataccttgggccactgctgttcgtaagagtgcagaaatggcattatctcacggatgacgcctggttctgcaactggatttctgtgaagggccccggagaccaaggatcagagtacatgttcccctgttaccgatgggttcagggcagaagcatcctgagcctccctgagggcactggctgcaccgtggttgaagattctcaaggactgttcaggaaacatagggaagaggagcttgaagagaggaggagtctgtacaggtggggcaactggaaggatggctcaatcctgaatgtggcggcggccagtatatctgacctccctgtagaccaacgatttcgagaggacaaaagaattgaatttgaagcttcacaggttataggggtaatggatactgttgtcaactttcctataaacactgtgacctgctggaaaagcctagatgacttcaactgcgttttcaagagtggccataccaaaatggctgagcgggttcgaaactcctggaaggaagatgcgttctttgggtaccaattcctcaatggtgctaaccccatggtgctgaagcgctctacttgtcttcctgcccgcctggtattccctccaggaatggagaagctacaggcccagctgaacaaggagctccagaaaggcactctgtttgaagcggatttcttccttctggatgggatcaaggccaatgtcatcctttgtagccagcagtacctggctgcccctctcgtcatgctgaagctgatgcctgatggacaactcttgcccatagccatccagcttgaactgcccaaaactgggtctactccaccacctattttcacgccctcggatcccccaatggactggctcctagccaaatgctgggtccggagctccgacttacagctccatgagctgcaggctcatcttctgaggggacacttgatggctgagctctttgctgtggccaccatgaggtgcctgccttccgtgcaccctgtttttaagcttctagttcctcatctgctttacaccatggaaattaatgtccgggccaggagtgacctgatctcagagagaggcttttttgacaaggcaatgagcacaggtgggggaggccacctggatcttctcaagcaagctggagcctttctgacctattgctcattgtgtccccccgatgacttggctgagcgaggactcttggatatcgagacttgcttctatgctaaagacgccctgcgactctggcagatcatgaatcggtacgtggtgggaatgttcaatctccactacaagaccgacaaagctgtgcaagacgactatgaactgcagagctggtgtcgagagatcactgacattggtcttcaaggggcccaggacagaggcttccctacctctcttcagtcccgggctcaggcttgctacttcatcaccatgtgcatcttcacgtgcaccgcacagcactcttccgtccatcttggccagctggattggttctactgggttcctaatgcaccctgcaccatgcggctgccaccacccaccaccaaggaagcaacaatggagaagctgatggctacactgcccaaccctaatcagtctactctccagataaatgtcgtttggctcctgggcagacgccaggctgttatggtgcccctgggccagcattcagaggaacactttccaaaccctgaggccaaggctgtgctgaagaagttcagagaggaactggctgccttggataaggaaattgagattcgtaataagagcttggacataccttatgagtacctgcggcccagcatggtggaaaacagcgtggccatatgagcatccccagactcctgctttgttgtttagttaagac

SEQ ID NO: 179 - DNA, 1748 bp, Rattus norvegicus
  Genbank Accession No. NM_031035
ggcgggcgggaaggcgcctcccgcagtcgctcggaactgcggacctgagagcttcccgcagagggccggcggtgggagcggagtgggtcgggcggggccgagccgggccgtgggccgtgtgggggccaggccgggccggcggacggcaggatgggctgcaccgtgagcgccgaggacaaggcggcagccgagcgctctaagatgatcgacaagaacctgcgggaggacggcgagaaggcggcacgggaggtgaagttgcttctgttaggtgctggagaatcagggaagagcaccatcgtcaagcagatgaagatcatccacgaggatggctactcagaggaggagtgccggcagtaccgtgcggttgtctacagcaacaccatccagtctatcatggccatcgtcaaagccatgggcaacctgcagatcgactttgctgacccccagcgtgcggatgatgccaggcagctgttcgcactgtcctgtgctgccgaggagcaaggcatgcttccggaagacctgtcgggcgtcatccggaggctctgggctgaccatggtgtgcaagcctgctttggccgctcacgggaatatcaactcaatgactcagccgcttactacctgaatgacctggagcgcatagcacagagtgactatatccctacacagcaggatgtgctgcggacccgtgtgaagaccacaggcatcgtcgaaacacacttcaccttcaaggacttacacttcaagatgtttgatgtgggtggtcagcgatctgagcggaagaagtggatccactgctttgagggtgtcacggccatcatcttctgtgtcgccttgagcgcgtacgacttggtgctggctgaggatgaggagatgaatcgcatgcatgagagcatgaagctgtttgatagcatctgcaataataagtggttcacagacacctccatcatcctcttcctcaacaagaaggacctgtttgaagagaagatcacacagagccccctgaccatctgtttccctgagtacacaggggccaacaagtatgacgaggcagccagctacatccagagcaagtttgaggacctgaataaacgcaaagacaccaaggagatctacacgcacttcacatgcgccaccgacaccaagaacgtgcagtttgtgtttgatgccgtcactgacgtcatcatcaagaacaacctgaaggactgtggcctcttctgaggggcagtgggcctggcaggatgggccaccgctgactctgctccccactacctgtgaggaagatgggggcaagaagaccatgctccctgcctgttcccccagctgcttctcccctgtctcttctctctgttctcagctcccctgtcccctccctcggctctagacttgggggaggggttgccacaggcctccctgtctaaaacccacctttgtctgaggtgccgggagtggccatggtacctccttactgggcatccattcgggttttctaaccattgtcttgttctgggggtgagcggggagcgcatgcagagtttcccaaggcctatgtctggaggagtaccaattcctccagcctagacccctggctttgtccaacaccagccctgacccaagtccaaatgtttacagggagcctcctgcctaccccactctctgccgcttggaggccccaaaggaaaaagcacaagaagcgtgagagacaccaccattcctggagacaaagcccacctgctcattctcgtagcttt

SEQ ID NO: 180 - DNA, 1740 bp, Rattus norvegicus
  Genbank Accession No. NM_031050
cggaaacagtgtcaagagagtaagggcacagaggacttgctgaaaatgaatgtatgtacgttcactcttgtcttggcattagtcggtagtgtcagtggccaatactatgattatgatgcccctctcttcatgtatggggaactgtcacccaactgtgcaccagaatgtaactgtccccacagctacccaactgccatgtactgtgatgatctcaagttgaaaagtgtgcccatggtgccccctggcatcaagtacctttacctgaggaataaccagatcgaccatattgatgaaaaggcctttgagaatgtaacggatctgcagtggctcattcttgaccacaatcttctagaaaactccaagatcaaaggaaaggtcttctctaagctgaaacaactgaagaagctgcatataaactacaacaatttgaccgagtccgtgggtccgctcccaaagtccctacaagaccttcagctggccaataataagatcagcaagctgggctccttcgacgggctggtaaacctgaccttcatttaccttcaacacaaccagctcaaagaggaggctgtctcggcttctctgaaaggccttaagtcactcgaatacctcgacttgagcttcaatcagatgagcaagctgcccgctggccttccaacatctcttctaactctctacctagacaacaataagatcaccaacattcctgatgagtatttcaatcgcttcaccgggcttcaatacttgcgtttatctcacaatgagctggctgacagtggcgtgcctggaaactcatttaacatatcatctctgctcgagctcgatctctcctacaataagctcaagagtataccaaccgttaatgaaaaccttgaaaactattacctggaggtcaataaactcgaaaagtttgatgtcaagagcttctgtaagatcctgggaccactatcttactccaagatcaagcatttgcgcttggatggcaatcccctcactcaaagcagtctgccccctgacatgtacgagtgtctacgtgtagcaaatgaaatcacggttaattaacctcctctcattctaatacattgaagtatgttccagagcagtacttcatggatgggtatttgctggatgtgttaaagttttcacaatatcctttacattgttattgtcattgttgttgttggtattacttcatggattttaattaataaaggaaatgttttgtgaacatttaccactttttaaataaaagatgaaaagcaggcctatttcatcgtgagaacagacacataaaacccgttaaacttaagtctatttgtgaatttaatgttttctatagctctatgttcaggtgattatgaagcctttttactgattgcttggaagtccaccaggtttctatggttcctcacattttacattagtgacttcgaaaacatgaaacaaacatgcatggatgtttgttatcctaatccaaatttttgtgacatgtcaagtttgttttacagaagtttagatcctatgttttgaaaccagtgatttgcaacataccaaagaaaattactaaagacctgtctacttaaagaaatgtagttagcagtaagaatttcccagttacttaatgaaacttttcttgagtcattttcctgtcatatctatgtttctttctgattgtttgcatgttatgattaacaagctgatagcaaaataaaacaatgcaaatggtaaaaaaaaaaaaaa

SEQ ID NO: 181 - DNA, 710 bp, Rattus norvegicus
  Genbank Accession No. NM_031065
cttttccggttcccgcagccgcagccatgagcagcaaagtttcacgcgacaccctctacgaggcggtgcgggaagtcctgcacgggaaccagcgtaagcgccgcaagtttctggagacggtggagctgcagatcagcctgaagaactacgaccctcagaaggacaaacgcttctcgggcaccgtcaggcttaagtccacccctcgccccaagttctccgtgtgcgtcctgggggaccagcagcactgtgatgaagccaaggccgtggatatcccccacatggacatcgaggcgctcaagaagcttaacaagaacaagaagttggtcaaaaagctggccaagaagtatgatgcctttttggcctccgagtctctgatcaagcaaatcccacgtatcctgggcccaggcctaaacaaggcgggcaagttcccctccctgctgacacacaatgaaaacatggtggccaaagtggatgaggtgaaatccacaatcaagttccagatgaagaaggtgctgtgtctggccgttgccgtcggccacgtgaagatgaccgatgacgagctagtctacaacatccacctggctgtcaacttcttggtgtccttactcaagaaaaactggcagaacgtccgggctctgtacatcaagagcaccatgggcaagccccagcgtctgtattaggacgctccaataaacctcgttgctgccttc

SEQ ID NO: 182 - DNA, 1069 bp, Rattus norvegicus
  Genbank Accession No. NM_031099
tcgcttgcgtcctggaggtgctacatactgcgcatgcgtacgcgactccggtctttttccccctagcgcggccgactctgcaggtctgcgtggagccgcagttgcgggtctctgttccgcaggatggggttcgtgaaagttgtcaagaataaggcctactttaaaagataccaagtgagatttagaaggcggcgagagggtaaaactgactactatgcacggaaacgattggtgatccaggacaaaaataagtacaacacaccgaaatacaggatgatagttcgtgtaacgaacagagacatcatctgccagattgcatatgcccgtatagaaggggatatgatcgtctgtgcagcatatgcacatgaacttccaaaatacggtgtgaaagttggcctgacaaactatgctgcagcctattgcactggcctgctgctggcccgcaggcttctgaataggtttggcatggacaagatctatgaaggccaagtggaggtgaatggagacgagtacaatgtggaaagcatagacggtcagcctggtgccttcacttgctatctggatgcgggtcttgcccgaactacaactggcaataaagtttttggcgccctgaagggagctgtggatggaggcttatctatcccccatagtactaaacgattccctggctatgactctgaaagcaaggagttcaatgcagaggtgcaccggaagcacatcatgggtcagaatgtggcagactacatgcgctacctgatggaggaggatgaggatgcgtataagaaacagttctctcagtacatcaagaacaacgtgactccagacatgatggaggagatgtataagaaagctcatgctgctatccgagagaatccagtctacgagaagaagcccaagagagaagtgaagaagaagaggtggaatcgtcccaaaatgtctcttgcccagaagaaagaccgggttgctcaaaagaaggcaagcttcctcagagctcaggaacgggctgctgaaagctaaagccattttctatgaagattttttcataaagacaataaacattgatcaaagc

SEQ ID NO: 183 - DNA, 769 bp, Rattus norvegicus
  Genbank Accession No. NM_031100
tcaggcctgggagcgtctcttttcctctggcaccccatcgacgatcctagttgtcatcatgggccgccgccccgcccggtgttatcgctattgtaagaacaagccatacccaaagtctcgtttctgtcgtggtgtccctgatgctaagatccgcatctttgacttgggacggaagaaagcaaaagtggatgaatttccactttgtggccacatggtgtcagatgaatatgaacaactctcttctgaagctctggaggctgctcgtatttgtgccaacaaatacatggtaaagagttgtggcaaggatggctttcatatccgggtgaggctccaccctttccatgtcatccgtatcaacaagatgttgtcctgtgctggggctgacaggctccagacaggtatgcgtggtgcctttgggaaaccccaggggacagtagccagggttcacattggccaagtcatcatgtctatccgaaccaagctgcagaataaggaacatgtgattgaggctctgcgcagggccaagttcaagttccctggccggcagaagatccacatctcaaagaaatggggttttaccaagttcaatgcagatgaatttgaagacatggttgctgagaagcggctcattcctgatggctgtggtgtcaaatatatccccaatcgtggtcctcttgacaagtggagagccctgcattcctgaaggcttccacagtgcgctcctatgcgctatcaaatgaggttcaataataaagtctcgcgttcaaaa

SEQ ID NO: 184 - DNA, 722 bp, Rattus norvegicus
  Genbank Accession No. NM_031101
tcctttccgctcggccgttctcctgtacaggaggcagccatggcgcccagccggaatggcatgatcctgaagccccacttccacaaggactggcagcagcgagtggacacgtggttcaaccagccggcccgcaagatccgcagacgcaaggcccggcaggcgaaagcgcgccgcatcgcccctcgccccgcgtccggtcccatcagccccatcgtgaggtgccctacagttagataccacaccaaggtccgggctggcaggggcttcagcctggaggagctcagggtggctggtatccacaagaaaatggcacgcaccatcggcatctccgtggacccaaggaggcgaaacaaatccacggagtcactgcaggccaacgtgcagcgcctgaaggagtaccgctccaagctcatacttttccccaggaagccttctgctccgaagaagggagacagttctgctgaagaacttaaattggccacgcagctaacaggacctgtgatgcccatccggaatgtgtacaaaaaggagaaggccagagccatcacggaagaggagaagaactttaaggctttcgccagccttcgcatggcccgagccaatgcccggctcttcggcatccgagcaaagagggcgaaagaagccgcagagcaagacgttgagaagaagaaataatgcgcggctggagagttgtaataaattttccataaagcaaaaaaaaa

SEQ ID NO: 185 - DNA, 703 bp, Rattus norvegicus
  Genbank Accession No. NM_031103
ctttcctttcgctgctgcgtctgcagccatgagtatgcttaggctacagaagaggcttgcctctagcgtcctccgctgtggtaaaaagaaggtgtggttggaccccaatgaaaccaacgaaatcgccaatgccaactctcgtcaacagatcaggaagctgatcaaagatggcctgatcatccggaagcctgtgactgtccattcccgggctcgatgccggaagaacaccttggcccgacggaagggcaggcatatgggcatagggaagaggaagggtactgccaacgctcggatgcccgagaaggtgacctggatgcgaaggatgaggatcctgcgccggcttctcaggagataccgggaatctaagaagattgaccgtcatatgtatcacagcctgtacctgaaggtcaaagggaatgtgttcaaaaacaagcggattctcatggagcacatccacaaactgaaggcagacaaggcccgcaagaagctactggctgaccaggctgaggctcgcaggtctaagaccaaggaagcacgaaagcgccgggaggagcgcctccaagccaagaaggaggagatcatcaagactctgtccaaggaggaagagaccaagaaatgaagcgtccctcgtgtctgtacatagtggccaggctatggcctcacatggatcagtcattaaaataaaacaagccttcgtccttgt

SEQ ID NO: 186 - DNA, 444 bp, Rattus norvegicus
  Genbank Accession No. NM_031105
gctgccgggtctctcgttttcatcgcagacacttctgctgcaaagatggtcaacgtacctaaaacccgaaggactttctgtaagaaatgtggcaagcaccagcctcacaaagtgacccagtataagaagggcaaggattccctgtatgcccaaggaaagcggcgctacgaccggaagcagagtggctatggcgggcagacaaagccaatttttcgaaagaaggccaaaaccacaaagaagattgtgctcaggcttgagtgtgttgagcccaactgcagatctaagaggatgctggccattaagagatgcaagcattttgaactgggaggcgacaagaagagaaagggtcaagtgatccagttctaaaacttgtgttttcttagaggaaaatactgaagcagtagaataatgacctgctagagaataaaagttattgttactggt

SEQ ID NO: 187 - DNA, 610 bp, Rattus norvegicus
  Genbank Accession No. NM_031109
ggggggggggggggggagcctccgcctcggaccctgtagccgccgcgatgttgatgcccaagaagaaccggattgccatctatgaactcctttttaaggaaggggtgatggttgccaaaaaagacgtccacatgcccaaacaccccgagctggcagacaagaacgttcccaaccttcacgtcatgaaggccatgcagtctctcaagtctcgaggctacgtgaaggagcagtttgcttggagacatttctactggtacctcacgaatgagggcatccagtacctccgagattacctgcacctacctccggagatcgtgcccgccaccctgcgccgcagccgtcccgagactggcaggcctcggcccaaaggtccagagggtgagcggcctgcaagattcacaagaggggaggcagacagagacacctacagaaggagcgctgtgccccctggagctgacaagaaagctgaggctggggctggctcggcaacggagttccagtttagagggggtttcggtcgtggacgtggtcagccacctcagtgaagttggagattatgttgtgttgaataaactttaaaaaaaaaaaaaaaaaaccccccccccccccc

SEQ ID NO: 188 - DNA, 534 bp, Rattus norvegicus
  Genbank Accession No. NM_031110
agatggcggacattcagacggagcgtgcttaccaaaagcagcctacaatctttcaaaacaagaaacgtgttttgctgggagaaactggcaaggaaaaactccctcggtactacaaaaacatcggtctaggcttcaagacgcccaaggaggccatcgagggcacctacatagacaagaaatgccccttcactggtaatgtctccatccgaggacggatcctgtctggtgttgtgacgaagatgaagatgcagaggaccattgtcatccgccgggactatctccattatatccgaaagtacaaccgctttgagaagcgtcacaagaacatgtctgtgcacctgtccccctgtttcagggacgtccagattggcgacattgtcactgttggagagtgcaggcctctgagcaagactgttcgattcaatgtgctcaaggtcaccaaggctgctggcaccaagaagcagttccagaagttctgaggggggactgtagccaatgctctagaacaaataaaagttattttccaacttacag

SEQ ID NO: 189 - DNA, 552 bp, Rattus norvegicus
  Genbank Accession No. NM_031113
  misc_feature (1)..(552): n = a or c or g or t
cttcctttccgatccgccatcgttggtggagcagccgccacgatgcagatttttgtgaagacccttacagggaagaccatcacgctcgaggttgaaccctcggacactatagaaaatgtaaaggccaagatccaggataaggaaggaattcctcctgatcagcagaggttgatctttgctggtaagcagttggaagatggccgtactttgtctgactacaacattcaaaaggagtccactctccatctcgtgctgagacttcgtggtggcgctaagaaaaggaagaagaagtcttacaccaccccaaagaagaacaagcataagagaaagaaggtcaagttggctgtgctgaaatactataaggtggatgaaaatggcaaaatcagccgacttcgtcgggaatgtccttctgatgaatgtggtgctggagttttcatgggtagccactttgacaggcattactgtggcaagtgttgtctgacttactgcttcaacaaaccagaagacaagtagttgtgtatgagttaataaagagaaggaactgatgttaan

SEQ ID NO: 190 - DNA, 279 bp, Rattus norvegicus
  Genbank Accession No. NM_031116
atgaagatctctgcagctgcatccctcaccgtcatcctcgttgcagccgccctctgcacccccgtacctgcctccccatatggctcggacaccactccctgctgctttgcctacctctccctcgcactgccccgtgcccacgtgaaggagtatttttacaccagcagcaagtgctccaaccttgcagtcgtctttgtcactcgaaggaaccgccaagtgtgtgccaacccagagaagaagtgggttcaagaatacatcaactatttggagatgagctag

SEQ ID NO: 191 - DNA, 1428 bp, Rattus norvegicus
  Genbank Accession No. NM_031117
ccgtctgaccgactccttgggtatattagtgcggcatctgcgtgtaacacgttgcctttattatggtggtctgaggttgttgattgtgaaatccaggatgtaggagctatgttgccgcagcctctgggctccgggatccgagagctcttttgtatcggccggtggaatctttggatgttcgagctgtattgccgcgacctgtagattcagggatcgtttacacttgagaagaactactgaacagcacgtgccagagattgaggtccaggtcaaacgtagaaggacagcctcactgagcaaccaagagtgtcacttgtacccacggcgttctcagcaacagcaaattcctgtggtggatttccaggcagaactgagacaggcgttcttagctgagacaccaagaggtggttaaagcagtattggaacttcaaggtggtggaagtcaacaaacacaggacctatccactgattgtgaaactttggtcaagcttacactgtgttaatagcctgcatcaaacctttatttattgcccttctccaagtattaaggatcttgaaattttagtgttgacaactgctattgtggaacagcaatcatgactgtgggtaagagtagcaagatgctccagcatattgactatagaatgagatgtatcctgcaagatggaagaatcttcattggcacctttaaggcttttgacaagcatatgaatttgatcctctgtgattgtgatgagttcaggaagatcaagccaaagaatgcaaaacagccagaacgtgaagaaaaacgggttttgggtctggtcttgctacgtggagagaacttggtttccatgacagtggagggtccacctcctaaagatactggcattgctcgtgtgccacttgctggtgctgcaggtggccctggtgttggaagagcagctggcagaggagtaccagcaggtgtacctattccccaagctcctgctggattagcaggccctgtccgaggagttggaggcccatcccagcaggtcatgaccccacagggaagaggcactgttgcagctgctgctgttgctgctactgctagcattgcaggagccccaacccagtacccgccaggacggggaactccacctccacctgtaggcagagcaaccccacctccaggcattatggctcctccacctggaatgagaccacccatgggcccaccaattggacttccccctgctcgagggacacctataggcatgccccctccaggaatgagaccccctcctccaggaattagaggcccacctcccccaggaatgcgtccaccaagaccctaagatacagttgataaatctcagcccttctctttccctacaatgcttcttgtgaaattgtgtcgcctgcaagcttttgacccctcttactgcattaactatagataatacc

SEQ ID NO: 192 - DNA, 2880 bp, Rattus norvegicus
  Genbank Accession No. NM_031131
tcagagccctcaccctctcccttccaggagaaaaaacaaacctttcttactccttaaagtgagagatccccctcctgcctccctagcatcgcatattaatatctccacgttgggaacgcgttgcattttcttttttaaaggaatcctagccagggacgtttttctattgggcattgactttcaactgctttgcaaaagtttcgtattaaaaacaactctacctgacccgctctgagaattactagtttctttttatatttttttcttactttaaacaacaacaacaacgtttcctccttttaaaaacatgcactactgtgtgctgagaacctttttgctcctgcatctggtcccggtggcgctcagtctgtctacctgcagcaccctcgacatggaccagtttatgcgcaagaggatcgaggccatccgcgggcagatcctgagcaagctgaagctcaccagccccccggaagactatccggagccggatgaggtccccccggaggtgatttccatctacaacagtaccagggacttactgcaggagaaggcaagccggagggcagccgcctgcgagcgcgagcgaagcgacgaggagtactacgccaaggaggtttataaaatcgacatgccgtcccacttcccctccgaaactgtctgcccagttgttacaacatcctctggctcagtgggcagcttttgctccatacagtcccaggtgctctgtgggtaccttgatgccatcccgcccactttctacagaccctacttcagaatcgtccgcttcgatgtctcaacaatggagaagaatgcttcaaatctggtgaaggcagagttcagggtctttcgcttgcagaaccccaaggccagagtggctgaacaacggattgaactgtatcagatccttaaatccaaagacctaacatctccaacccagcgctacattgatagcaaggttgtgaaaaccagagccgagggggaatggctctccttcgacgtgacagacgccgtgcacgagtggcttcaccacaaagacaggaacctgggatttaaaataagtttacactgcccctgctgtaccttcataccgtctaataattacatcatcccaaataagagccaagagctggaggcgagattcgcaggtatcgatggcacctccacatatgccagtggtgatcagaaaactataaagtccactaggaaaaaaagcagtgggaagaccccgcatctcctgctaatgttgttgccctcctacagactggagtcccagcagtccagccggcgacggaagcgggctttggatgccgcctattgctttaggaatgtgcaggataattgctgccttcgccctctttacattgattttaagagggatcttggatggaaatggatccatgaacccaaaggatacaatgctaacttctgtgctggggcatgcccttatctgtggagttcagacacacaacacaccaaagtcctcagcctgtacaacaccataaaccccgaagcttctgcttccccttgctgtgtgtcccaggatctggaaccactgaccatcctctactacattggcaatacgcccaagatcgaacagctttccaacatgatcgtcaagtcttgtaaatgcagctaaagtcctcgggaaagccaggatgaaaatcacggtgacaatgacgtatgacgacaatgacgatgataatgttcgtgacgtgagggagttttgattcatcagtgttgaaaaaaaaattggaggaaaaaaaaatcggtactagttcaaacactttgcaagcttgtgttctgtttgttaaaactggcatctgggattacagcaacaacagccacaaaaatggaaggcgctagtctgcatctcacctacttcctgagagacacaaaaagaaaacatcttttttttttaaaggaaaaaataaacactggaagaatttgttagtgttaattatgtgaaagaaaaaacaaaacaaaacaggaaaatccgttcagtggagttgtatgtattgtttccaccccattcttcaccccacgcctctcttgtttcctctgtattgctctgcaatgggcgccctccccatcccttcctctgagttaacagtgggttatttattgtgttactatataatgaacctttcattgcccttggaaaataaaacaggtgtataagtggagaccaaatactttgccacaaactcatggatggcttaaggaatttggactcaaataagccagggggaaggaggtcatactggatgaccccctgtgagccgttatagaactgagcaagtctgagaaaaaaaaatcaaagccccagaaaacatgtgctgtgcactgcctgccgaagcttcatgagcagccatctgtccagaaggcctgttaacaagaaaacttggaatcagtgggaatctggaagattggttttttttccttctaattgtaaatggttctttgccagtttaagcaagccggtgaaatggtgacctgcttggatgtgtattgtcagacttttgaccgtgaagtggctgttgatctacaatacaggttttttttttccctttgtctcggtatacggtaattacatggatattattaaaatagacgggtctagaagccagcatgatgaaaacacactgcaaatctgttttacaaactattaaatcgaaacagtaactactttacatgtaatgtgtagatcttaccacatttttaaatattctgtaataatgattatgatttagattgaacttaaatttgaactctctctctttttttaatgatcattcagactgtatgtttgcctcctttagctggccagtacctttgaataaaacccctagattttgacttgcactacaaaaaaaaaaaaaa

SEQ ID NO: 193 - DNA, 1796 bp, Rattus norvegicus
  Genbank Accession No. NM_031140
gttcacagccactgcgccctcgctctcttcttgcagatcttgcagccgcagcaagccaggccacctcgtccttcgaagccatgtccaccaggtccgtgtcctcgtcctcctaccgcaggatgttcggtggctccggcacatcgagccggcccagctccaaccggagctatgtgaccacatccacccgcacctacagcctaggcagcgcgctgcgccccagcactagccgcagcctctattcctcgtccccgggtggcgcctatgtgacccggtcctccgccgtgcgcctgcggagcagcatgcccggcgtgcggctgctgcaggactccgtggacttctcgctggccgacgccatcaacaccgagttcaagaacacccgcaccaacgagaaggtggaattgcaggagctgaatgaccgcttcgccaactacatcgacaaggtgcgcttcctcgagcagcagaacaaaatcctgctggccgagctcgagcagcttaagggccagggcaagtcgcgcctgggcgacctctacgaggaggagatgagggagttgcgccggcaggtggatcagctcaccaatgacaaggcccgtgtcgaggtggagagggacaacctggccgaggacatcatgcggctgcgagaaaaattgcaggaggagatgctccagagggaggaagccgagagcaccctgcagtcattcagacaggatgttgacaatgcttctctggcacgtcttgaccttgaacgtaaagtggaatccttgcaggaagaaattgcctttttgaagaagctgcacgatgaagagatccaggagctgcaggcccagattcaggaacagcatgtccagatcgatgtggacgtttccaagcctgacctcaccgctgccctgcgtgatgtccgccagcagtatgaaagtgtggctgccaagaacctccaggaggccgaggaatggtacaagtccaagtttgctgacctctctgaggctgccaaccggaacaacgatgccctgcgccaggcaaagcaggagtcaaacgaataccggagacaggtgcagtcactcacctgcgaagtggatgcccttaaaggcactaatgagtccctggagcgccagatgcgtgaaatggaagagaattttgcccttgaagctgctaactaccaggacactattggccgcctgcaggatgagatccagaacatgaaggaagagatggctcgccaccttcgtgaataccaggacctgctcaatgtaaagatggctcttgacattgagatcgccacctacaggaagctgctggaaggggaggagagcaggatttctctgcctcttccaaacttttcttccctgaacctgagagaaactaacctggagtcacttcctctggttgacacccactccaaaagaacactcctgattaagacggttgaaaccagagacggacaggtgatcaatgagacttctcagcaccacgatgaccttgaataaaaactgcacaggctcagtgcaacggcgcagtaccagcaagaaggaaaaaaaaatcgtatcttagaaaaaagagctttcaagtgcctttactgcagttttcaggagcgcaagatagatctgggatagaaacgagctcagcacataacaactgacacccccaaaaggcgtagaaaaggtttacaaaataatctagttttacgaagaaatcttgtgctagaatactttttaaagtatttttgaataccattaaaactgctttctttttccagaaaatatctgaccaacttgttactgcttcaataaaacttcagaaat

SEQ ID NO: 194 - DNA, 3560 bp, Rattus norvegicus
  Genbank Accession No. NM_031143
ggagcggaggctgcttccccggcacctgggagtgggtcgcggggacgcgaaggcacagggcgggcggacgcgccttcgccatgagcttggcggcggtgcggaccgggcgtgctgagctccggccgccggcccggcatgggcgtctcccgcgagcccgctgccggccggggctagggccggatggagccgcgggaccccagccccgaggcccggagcagcgactcggagtcggcctccgcctcgtccagcggctccgagcgcgacgcggatccggagccggacaaggctccgcggcgcttaaccaagaggcgcttcccggggctgcggctctttgggcacaggaaagccatcaccaagtcgggcctccagcacctggcaccccctcctcccacgcctggggccccgtgcggtgaatctgagcggcagatccggagtactgtggactggagtgagtcagcagcgtatggggagcacatctggtttgagaccaacgtgtccggagatttctgctatgtcggggagcagtactgtgtagctaagatgctgccgaagtcagcgcccagaagaaagtgtgcagcctgtaagatcgtggtgcataccccttgcatcgggcagctggaaaagatcaatttccgctgtaagccatccttccgtgaatcaggctccaggaatgtccgtgagccaaccttcgtaagacaccactgggtccacaggcgacgccaggatggcaagtgtcggcactgtgggaagggcttccagcagaagttcaccttccacagcaaagagatcgtagctatcagctgttcctggtgcaaacaggcgtaccacagcaaggtgtcctgcttcatgctgcagcagattgaggagccctgttccctaggggtgcatgcagccgtggtcatcccacccacctggatcctacgggcccggaggccccagaacaccctcaaggccagcaagaagaaaaagagagcatccttcaaaaggagatccagtaagaaaggacctgaggaaggccgctggagacccttcatcatcaggcccaccccgtcccccctcatgaagcccctgctagtgtttgtaaaccccaagagtgggggtaaccagggcgctaagatcatccagtcttttctgtggtatctgaacccccggcaagtcttcgatctgagccagggaggacccagggaagcgctggaaatgtaccgcaaagtccataatttgaggattctggcttgcgggggtgatggcacggttggctggattctttccaccctagaccagctgcgcttaaaaccaccacctcctgtggccatcctgcccctgggcactggcaatgacctggcccgaactctcaactggggtgggggttacacagatgagccagtgtcaaagatcctttcccatgtagaggaggggaacgtggtacagctggaccgttgggacctccgagcagagcccaaccctgaggcagggcctgaggagcgagatgacggagccactgaccggctgcccctggatgtcttcaacaactacttcagtctgggctttgatgcccacgtcaccctggagtttcatgagtctcgagaagccaacccagagaagttcaacagccgctttcggaataagatgttctatgctgggacagccttctctgacttcctgatgggcagctccaaggacttagccaagcacatccgagtagtgtgtgacggaatggacctaacccccaagattcaggacctgaaaccgcagtgcatagtctttctgaatatccccaggtactgtgcaggcaccatgccctggggccaccctggggagcaccatgacttcgagccccagaggcacgatgatggctacctcgaggtcatcggcttcaccatgacatccttggccgcattgcaggtgggtggacacggcgagcggctgacccagtgccgagaagtgctgctcaccactgccaaggccatccctgtgcaggtggatggtgaaccctgcaagcttgcagcatcgcggattcgaattgccctgcgcaaccaggccactatggtgcagaaggccaagcgccggagtactgccccactgcacagcgatcagcagccagttcctgagcagctgaggatccaagtgagcagggtcagcatgcacgactacgaggctctccattatgacaaggagcagctcaaggaggcctctgtgcctctgggtactgtggtggtccccggagacagtgacctagagctctgccgagcccacattgagagactccagcaggagcccgatggggctggagccaagtcccccatgtgccacccactgtcctccaagtggtgtttcctggacgccaccactgccagccgcttctacaggatcgacagggcccaggagcacctcaactatgtgacggagattgcccaggatgagatttatatcctagacccagagctgctgggtgcatcagcccgacctgacctccctacccctacctccccgctccctgcctccccctgctcccctacacccgggtcactgcagggggatgccgcactgccccaaggtgaagagctgattgaagctgccaagaggaatgacttctgcaagctccaggaactacaccgagcaggaggtgacctcatgcaccgcgaccatcagagccgcacactcctgcaccacgcagtcagcactggcagtaaggaagtggtccgctatctgctcgatcatgcaccaccagagatcctcgatgctgtggaggagaacggggagacctgtctacaccaggcagccgccctaggtcagcgcaccatctgccactacattgtggaagccggggcctccctcatgaagacagatcagcagggcgacactcccaggcagcgagctgagaaggctcaagacacagagctagctgcatacctggagaacagacaacattaccagatgatccaacgtgaggaccaggagacagctgtgtagttaaggggaccatggatcaacgagggacactaccagaggactagagctctccttgcccatctcactgccacattcctgtcagatggctatggggggaccctgtcacagggaaggagccccgtgccaccccctgagaagccgttcagatctagggctggactctaaggagctggactctcacctgtccctggtttcatggggaacaggaaacaagctgggctgactgggtccctcccttcaggcggcctccccctcaccacagctgatggaatggctggacagctcagtcagggaggcctgctctcagcaggactttctaaagccacctgatcccttgggctctttggaaggttctgggtgcctagccctcctctctgacccacacaccttgggcatcccagaaactcaagagcctgctgtatttgcctgcccgctgccctgcttggcacctaccctggtgatcctcctcatgcacccagtcatttcatttccgactgtatggcctggggtggggggtggggctcccacggtgacttgtttacagctgggtgtgactcagtaaagtgaagtttttttccttaaaaaaagcg

SEQ ID NO: 195 - DNA, 1128 bp, Rattus norvegicus
  Genbank Accession No. NM_031144
atggatgacgatatcgctgcgctcgtcgtcgacaacggctccggcatgtgcaaggccggcttcgcgggcgacgatgctccccgggccgtcttcccctccatcgtgggccgccctaggcaccagggtgtgatggtgggtatgggtcagaaggactcctacgtgggcgacgaggcccagagcaagagaggcatcctgaccctgaagtaccccattgaacacggcattgtaaccaactgggacgatatggagaagatttggcaccacactttctacaatgagctgcgtgtggcccctgaggagcaccctgtgctgctcaccgaggcccctctgaaccctaaggccaaccgtgaaaagatgacccagatcatgtttgagaccttcaacaccccagccatgtacgtagccatccaggctgtgttgtccctgtatgcctctggtcgtaccactggcattgtgatggactccggagacggggtcacccacactgtgcccatctatgagggttacgcgctccctcatgccatcctgcgtctggacctggctggccgggacctgacagactacctcatgaagatcctgaccgagcgtggctacagcttcaccaccacagctgagagggaaatcgtgcgtgacattaaagagaagctgtgctatgttgccctagacttcgagcaagagatggccactgccgcatcctcttcctccctggagaagagctatgagctgcctgacggtcaggtcatcactatcggcaatgagcggttccgatgccccgaggctctcttccagccttccttcctgggtatggaatcctgtggcatccatgaaactacattcaattccatcatgaagtgtgacgttgacatccgtaaagacctctatgccaacacagtgctgtctggtggcaccaccatgtacccaggcatcgctgacaggatgcagaaggagattactgccctggctcctagcaccatgaagatcaagatcattgctcctcctgagcgcaagtactctgtgtggattggtggctctatcctggcctcactgtccaccttccagcagatgtggatcagcaagcaggagtacgatgagtccggcccctccatcgtgcaccgcaaatgcttctag

SEQ ID NO: 196 - DNA, 1531 bp, Rattus norvegicus
  Genbank Accession No. NM_031237
ctctgggcgaagcgcggatataagtagctggtggctctgccaccccaccctgcccggatcgcgacggttttcagggttctggaatcagcagggttcctctgaggccttggcgagtggctgatctgctccgtttttgcaaaaggcgcctgtgtctggcagagccggtgtgagaagaagagagaatccttccccgccgccgggataatcaagagttttggccggacctttgagtacacatcgggatagtgagaagcccggcgaaaagcacagactatggcgctgaaacggattaataaggaacttagtgatttggcccgtgaccctccagcacaatgttctgcaggtccagttggagatgacatgtttcattggcaagccacaattatgggacctaatgacagcccatatcaaggtggtgtattctttttgacaattcattttcctacagactaccccttcaaaccacctaaggttgcatttacaacaagaatttatcatccaaatattaacagtaatggcagcatttgtcttgatattctaagatcacagtggtctcctgctttaactatttctaaagttcttttatccatttgttcactgctatgtgatccaaacccagatgaccccctagtgccagagattgcacggatctataaaacagacagagacaagtacaacagaatatctcgggaatggactcagaagtatgccatgtgatgctaccttaaagtcagaataacctgcattatagctggaataaactttaaattactgttccttttttgattttcttatccggctgctcccctatcagacctcatcttttttaattttattttttgtttccctccctccattcattcacatgctcatctgagaagacctaagttcttccagctttggacaataactgcttttagaaactgtaaagtagttacaagagaacagttgcccaagattcagaaatttttttaaaactggagcatgtgtattatgtggccaatgtcttcactctaacttggttatgagactaaaccaatcctcactgctctaacatgctgaagaagccatctgagggggagggggatggatgctgagctgtcacatcaaaggaaacagcattattccagcagcatccattcttgtctaaaccttccactgttagagatttgaggttacatgatatactttatgctcataactgatgtggctggagaattggtattgaattatagcatcagcagaacagaaaatgtgatgtattttatgcatgtcaataaaggaatgacctgttcttgttctacagagaatggaaattggaagtcaaacaccctttgtattccaaaatagggtctcaaaacattttgtaattttcatttaaattgttaggcttggagctattagttaatctatcttccaatactgtttaatatagcactgaataaatgatgcgagttgtcaatggatgagtgatcaactaatagctctcctagtaattgatttatttttcttcaataaagttgcataaacc

SEQ ID NO: 197 - DNA, 2318 bp, Rattus norvegicus
  Genbank Accession No. NM_031325
ggagcggcgggcggagaggtgtgtggagcttgtggcttgggaggaaggcgctgtccgagagaacgtgatctgcgcggccgctgtgtcctggccttggaagtggttcagtcatggttgagatcaagaagatctgttgcattggtgcgggctacgtcggcggacccacatgcagtgtcattgctcgcatgtgccctgaaatcagggtaacggttgtggatgtcaatgaggccaggatcaatgcatggaattctccaacgcttcctatttatgagcctggactaaaagaagtagtcgaatcctgtcgagggaaaaacctctttttttctaccaatattgatgatgccatcagagaagccgatctagtgtttatttctgtgaacacaccaacaaaaacatatggaatgggaaaaggccgggcggcagatctgaagtatatcgaagcttgtgctcgccgcattgtgcagaactcaaatgggtacaaaattgtgactgagaaaagcacagtccctgtgcgggcagcggaaagcatccgccgcatatttgatgccaacacaaagcccaacttgaatctacaggttctgtccaatcctgagttcttggcagagggaacagccatcaaggacctaaagaacccagacagagtcctgattggaggggatgagaccccagagggccagagagctgttcaggcactctgtgctgtgtacgagcactgggttcccaaggaaaagatcctcaccaccaacacttggtcctcagagctttccaaactggcagccaatgcttttcttgcccagaggatcagcagcattaactccataagtgctctgtgtgaaagcacaggcgccgatgtggaagaggtggcaacggctatcgggatggaccaaagaattggaaataagtttctaaaagccagcgttggttttggtgggggctgcttccaaaaagatgttctgaatttggtttatctctgtgaggctctgaatctgcccgaagtagctcgttactggcagcaggtcatagacatgaatgactaccagaggaggaggtttgcatcacggatcatagacagcctgtttaatacagtgactgataagaagatagctatcttggggtttgcgttcaaaaaggatactggtgataccagggagtcctccagtatctacattagcaaatacctgatggacgagggtgcgcacctccacatctacgaccccaaagtacccagggagcagatagtggtggatctttctcatccaggcgtctcagcggatgaccaagtgtccagactggtgaccatttccaaggatccatatgaagcatgtgatggcgcccatgccctcgttatctgcacagagtgggacatgtttaaggaactggattatgaacggattcataaaagaatgctgaagccagccttcatatttgatggccggcgtgtcctggatgggctccacaatgagctacagaccattggcttccagattgaaacaattggcaaaaaggtatcttccaagagaattccatacactcctggtgaaattccaaagtttagtcttcaggatccacctaacaagaagcccaaagtctagacgtcgcccttttgcctgtgatgatttggtactgcagggtagccagcgtctgtctgatactaagtggtaaatgaactacgtgtttttatggaaacaaaaatatttttgtaatcatcaaatttatactagctatctgggtgttagcatatctagtaattatgagtctagaataatttttatatatttttatattattgtactctcagttactgaatggatggaaaacaatcatgttggtttaaatgtcagtttttataaataaaaatgaaaccttgaattttttagcattacaggttgttacagactgcactgtaataacacaagggaaaggcagtctcatttccctacctgttgtctctgcttatcactaaatgggacttcgaagccgtgaaatcactgtgctaggatggctgatgaaggtctctggacttttgttttaatgagattatgtcattagtggttttagttgtctttgtgtctcccaaaaccactctgtctttctctccatgcgtaactcgggcagtgctttcttttttgaaaattcagcctgaggaggaaatcagtctatggtctagttcgtcctgcctcttagcttctgtacctgcttgtcacatttgcacctatgagtcaagatatgtttgttacctttattttgatttatttctattacaattcaatttttttcctttaattaagaaaaccaataaagtctcatgtgtaaactgg

SEQ ID NO: 198 - DNA, 1871 bp, Rattus norvegicus
  Genbank Accession No. NM_031327
ttgttggttctgtgtcgccgcgctcgccccggctcctcctgcgcgccacaatgagctccagcaccatcaagacgctcgctgtcgccgtcacccttctccacttgaccaggctggcactctccacctgccctgcctcctgccactgccctctggaggcgcccaagtgcgccccgggagtcggcttggtccgggacggctgcggctgctgtaaggtctgcgcgaagcaactcaacgaggactgcagcaaaacgcaaccctgcgaccacaccaaggggctggaatgcaatttcggcgccaattccaccgctctgaaagggatctgcagagctcagtcagaaggcagaccttgtgaatataactccaggatctaccagaacggggagagcttccaacccaactgtaaacatcagtgcacatgtattgacggtgctgtgggctgcattcctctgtgtccccaagaactgtctctccccaatctgggctgtcccaacccccggctggtgaaagtcagcgggcagtgctgtgaggaatgggtctgtgatgaagacagcattaaggactccctggacgaccaggacgacctccttggattcgatgcctcggaggtggagttaacaagaaacaatgagttaatcgcaactggcaaaggcagctcactgaagaggcttcctgtctttggcacggaacctcgagtcctttacaaccccctgcatgcccatggccagaaatgcatcgttcagactacgtcctggtcccagtgctccaagagctgcggaactggcatctccacacgagttaccaatgacaacccggagtgccgcctggtgaaagagacccggatctgtgaagtgcgtccttgtggacaaccagtgtacagcagcctaaaaaagggcaagaaatgcagcaagaccaagaaatccccagaaccagtccgatttacttatgcaggatgctccagtgtgaagaaataccggcccaaatactgcggctcctgcgtggacggccggtgctgcacacctctgcagaccaggaccgtgaagatgcggttccggtgcgaagatggcgagatgttctccaagaacgtcatgatgattcagtcctgcaagtgtaactacaactgcccgcatcccaacgaggcgtcgtttcgcctctacagtctgttcaacgatatccacaagttcagggactaaaggtctcctgggtttctagtgtgggtcggacagaggtgttgagcatcgtggagacgtgggcagacggtgggcgaacagtgccttgctcatcatcaagtaggattaaggtgtttcaaaactgccgtaggggctgctgctatggatggacagtaacgcagtcgcagttggagaatacttcgcttcatagtactggagcccgggttacgtacgcttcatattggagcatgtttatagatgatgttctgttttctgtttgtaaattattttgctaagtgtttttttttctttctttttttttttttttttttgctccatttctccccctccccccttggttctacaattgtaatagagataaaataagactagttgggtcaagtgaaagccccgcttgtcctttgacagaagtaaaatgaaaggcctctcctgccttccccagtggaggcaggggacactctgtgagtgcccttgaggctactacctgcactctaaactgcaaacagaaaccaggtgttctaagattgaatgtttttatttatcaaaatgtagctttcggggagggatggggaaatgtaatactggaataatttgtaaatgattttaattttatatcagtgaagagaatttatttataaaattaatcatttaataaagaaatatttacctaaaaaaaaaaaaaaa

SEQ ID NO: 199 - DNA, 3305 bp, Rattus norvegicus
  Genbank Accession No. NM_031358
cgttgctgtcgatcctgctcagtacgagaggaaccgcaacgaacatttggtgtatgtgcttggctgaggagccaatggggcgacgtaccatctgtgggattatgactgaacgcctctaagtcagaatcccgcccaggcgaacgatacggcagcgcaaggagcctcggttggccccggatagccggctccccgtccgtccccgtccggcgggtccccgctcgtcgcccccccgggtgcgggcgggtcccccccgggcgtcgggaccggggtcggtgcggagagccattcgtcccgggaaacgggtgcggccggaaagggggccgccctctcgcccgtcacgcttaacgcacgttcgtgtggaacctggcgctaaaccattcgtagacgacctgcttctgggtcggggtttcgtacgtagcagagcagctccctcgctgcgatctattgaaagacaaacccttgcctacaaagagccctaggcaagccagtgtagtgcctccccatgggggaaaccccttcctggggccaacggagccatgctgtcccgaaaaggcattatccctgaggaatatgtgttgacccggctggcagaggaccctacagagcccaggtaccgtactcgggagaggagggcccgcttcgtgtccaagaaaggcaactgcaacgtcgcccacaagaacatccgagagcagggccgcttcctgcaagatgtgttcaccacgctggtggacctcaagtggccccacacgctgctcattttcaccatgtccttcctgtgcagctggctgctcttcgccatggtctggtggctcatcgcctttgcccacggtgacttggcccccggagagggcaccaatgtgccttgcgtcacaagcatccactccttttcgtctgccttccttttctccatcgaggtccaggtgaccattggtttcggcgggcgcatggtgacagaggaatgtcccctggccatccttattctgatcgtgcagaatatcgtagggctaatgatcaacgccatcatgctgggctgcatcttcatgaaaacggcacaggcccatcggcgggcagaaaccctcatcttcagcaagcatgccgtgatcaccctgcgacatggccgcctgtgcttcatgcttcgcgtaggggacctccgaaaaagcatgatcattagcgccaccattcatatgcaggtggtgcgcaagaccaccagcccggagggcgaggttgtgcctctccaccaggtggacatccccatggagaacggtgtgggtggtaacagcatctttctggtggccccactcatcatctaccacgtcatcgactccaacagcccgctctacgacctggctcctagtgacctgcaccaccaccaggacctggagatcattgtcatcttggaaggtgtggtagaaaccacaggcattaccacccaggcccgcacctcctatctggctgacgagattctgtgggggcagcgttttgtccccatcgtggccgaggaggatggccgctattctgtggactactccaaattcgggaacaccgttaaagtgcccacaccactctgcacagcccgccagcttgatgaggaccgcagcctgctggatgccctgaccctcgcctcgtcgcgagggcccctgcgcaagcgcagtgtggctgtggcaaaggccaagcccaagtttagcatctctccggattccttgtcctgagttgcggtccctcaggcccccactcacttaggtgggcacatggaaagtgaagtacggtatgtagagtgctggggtgcgagcccctcggccagatgagggtctggcgtgggacaagaccctccttggctcagcctccccgccgctgtgtgcctggggtgttacaagatacttgtcactatgctatttctggccccagcaggagcctgtaccgggttatttttgttcctgctcctcccgggctcagctcaggactggcttaccctatgtccctgcccaacgatggggaggctatagaaggttcaggggtcctaaagctaaggtctggaaggaagccagtcttggtcctccacgaattcatctgccacaagcaggcaggtaattgggcaaaagcagcccccaagttgggagcctattgctgtttctgtagccactaagaaatacctggccaggccccagccctgttcgtgccacgctaaagaatcctgccagccagggaggaggtgggtgtcagagcgtgggagctgaggggcccacacagccacgacaggataagtttacctaggctctcctccatatggccggcttatgagagaaagggggacaagaaggaggcaaatgattggagaccttgatggtcccgttcagacgcgtgtctctgtcctctacccttgactccagccttctgcagagagagtggggactgctgccctgttttgtcccccggagaggctgggaagtggggcattgggcaaacactgagatacctggctgagaggccgaaaagggtcctgtgagtgccatacaagatctacttcaggcaaaactctgctcttggctccccatgggcagctgtcactttgtctgggggacactggtgggtagcaatgccttgtctaggttgtcagaaaaagaaatattggaaagttcaccctggtgagggaaagggaggtctccaaggcaaaaggcccttgggcttgacctgagcccggactctcagagcagtgtagtgtcctcgcccagaaccccactggcccgtcgtcaataaagcctcccatctgtgacctgaactctgggcttttcttgctggggaggcagtgggcatgccactggggggaaaaggcactgtcagagtctgccacctagcatggcccggcagcaagaggccagaaaagctacttagactagctcctccgtttccctcacctcaggaggccatcatccttccacctcagttccaccccccccccactctcagtctgtctggccaactccaccatttgacatccaccagacatcatagtcaagggcctgggctgtctcctgactctgctggaaggctgaggtgcccatggggagggggagggaggctgtaggcctcaggggtattgattggctcaaatcctggctccagctgaaccaccctgtgacccggttgtctcgcccatgttaatagtccctacctcattaggttgagcaggtgaaaacacatgtatacttgcttcggaagtgcctggtctgtacacaagtgctcaataaatgtcaaccgtcgtgatcgctgctgagctagccatgtgatgggaaaactaaacctaagac

SEQ ID NO: 200 - DNA, 3731 bp, Rattus norvegicus
  Genbank Accession No. NM_031514
atcctgcgcgcctccgggcgctcctgtgtggcccgacccgtgtcgccggttcctgaagcaggcgacgggaacaagatgtgaactgtttttcctccacagaagaagaggcccttctttcccctcccgggaaggccgatgttctgaaaaaggctgtggatgggaatggcttgccttacaatgacagaaatggagggaacctccacatctcctgcacatcagaatggtgatattcctggaaatgctaactctgtgaagcagacagagccagtccttcaagtgtacctgtaccattctcttgggcaagctgaaggagactatctgaagtttccaaatggagagtatgttgccgaagaaatttgtgtggctgcttctaaagcatgtggtattacgcctgtgtatcataatatgtttgctttaatgagtgaaacagaaaggatctggtatccacccaatcatgtcttccacatagatgagtcaaccaggcataatatactctacagaataaggttttactttcctcattggtactgcagtggcagcaacagaacctataggtacggagtatctcgtggggctgaagctcctctccttgacgactttgtcatgtcttacctttttgctcagtggcggcatgattttgttcatgggtggataaaagtacctgtgactcacgaaactcaggaagaatgtcttggcatggcagtgttagacatgatgagaatagctaaggagaaggaccagactcccctggctgtctataactccatcagctacaagacgttcttaccgaagtgcgtgcgagcgaagatccaggactatcacattttaactcggaagcggataaggtacagattccgcaggttcattcagcagttcagtcagtgcaaagccactgccaggaacctaaaacttaagtatctcataaacctggagaccctgcagtctgccttctacacagaacagtttgaagtaaaagaatctgcaagaggtccttcaggtgaggagatttttgcaaccattataataactggaaacggtggaattcagtggtcaagagggaaacataaggaaagtgagacactgacagaacaggatttacagttgtattgtgattttcctgatattattgatgtcagtattaagcaagcaaatcaggaatgctcaactgaaagtagagttgtgaccgtccacaagcaggacgggaaggtcttggaaatagaacttagctcattaaaagaagccttgtcatttgtgtcgttaattgacgggtattacagactaactgcggatgcacaccattacctctgtaaagaggtggctcctccagccgtgcttgaaaacatacacagcaactgtcacggcccaatttcaatggattttgccatcagcaaactaaagaaggcaggaaaccagactggactgtatgtacttcgatgtagccctaaggacttcaacaaatacttcctgacctttgccgttgagcgagaaaatgttattgaatataaacactgtttgattacaaagaatgagaatggagagtacaacctcagtgggactaagaggaacttcagtagtcttaaggaccttttgaattgctaccagatggaaactgtgcgctcagacagtatcatcttccagttcaccaaatgctgtcctccaaagccgaaagataaatcaaaccttcttgtcttcagaacaaatggtgtttctgatgttcagctctcaccaacattacagaggcataataatgtgaatcaaatggtgtttcacaaaatcaggaatgaagatttgatatttaatgaaagccttggccaaggcacttttacaaaaatatttaaaggtgtaagaagagaagttggagattatggtcagctgcacgaaaccgaagttcttttgaaagtcctagataaagcacatagaaactattcagagtctttctttgaagcagcaagcatgatgagtcagctttctcacaagcatttggttttgaattatggagtatgtgtctgtggagaggagaacattttggttcaagagtttgtaaaatttggatccctggatacatacctgaaaaaaaacaaaaattccataaatatactatggaaacttggagtggccaaacagttggcatgggccatgcacttcctcgaagaaaaatcccttattcatgggaatgtgtgtgccaaaaatatcctgcttatcagagaagaagacaggaaaacagggaatccacctttcatcaaacttagtgatcctgggattagcatcacagttctaccaaaggacattcttcaggagagaataccatgggtaccacctgagtgcattgaaaaccctaaaaatctaactttggcaacagacaagtggagctttggcaccactctgtgggagatctgcagtggaggagacaagcctctgagtgctctggactctcaaagaaagctgcagttctatgaagataagcaccagctcccagcacccaagtggacagagttggcaaaccttataaatacttgcatggattatgagccagacttcaggcctgccttcagagctgtcatccgtgatctgaacagcctgtttactccagattatgaactgctgacagaaaatgacatgctacccaacatgagaataggtgccctaggattttctggtgcttttgaagacagggaccctacacagtttgaagagagacacttgaaatttctacagcaacttggcaagggtaactttgggagtgtggagatgtgccgctatgacccgctgcaggacaacactggagaggtggtagctgttaagaagctccagcacagcacggaagagcatctccgagactttgaaagggaaattgaaatcctgaaatccttgcagcatgacaacatcgtgaagtacaagggagtgtgctacagtgctggtcggcgcaacctaagattaattatggaatatttgccgtatggaagtttacgagactatctccaaaaacataaagaacggatagatcacaaaaaacttctgcagtatacatcccagatatgcaagggcatggagtatcttggtacaaaaaggtatatccaccgggatctggcaacaaggaatatattggtagaaaatgagaacagagttaaaataggagattttggattaaccaaagtcttgccacaggacaaagaatactacaaagtaaaggaaccaggtgaaagtcccatattctggtatgctcccgaatccttgacagagagcaagttttctgtggcctcagatgtgtggagctttggtgtggttctgtacgaacttttcacgtatatcgagaagagcaaaagcccacctgtggaatttatgcgaatgatcggcaatgataaacaagggcagatgatcgtattccatttgatagagctactgaagaacaacggaagactgccgagaccagaagggtgcccagacgagatttatgtgatcatgacagaatgctggaacaacaatgtcaaccaacgtccctctttcagggacctttcccttcgggtggatcaaatccgggacagtatggctgcatgaaagaggtgacctttactcagagaccaagtagacttccagaaccagagcaaagctctgtagccacatggccatggactcgtgtccacgggcccttatcatgatgctagccagaaggaaatgtgatgctgtctgctcaagactttggaagcgttgtggatttttatgtaccatctgta

SEQ ID NO: 201 - DNA, 780 bp, Rattus norvegicus
  Genbank Accession No. NM_031530
gcagagacacagacagaggccagcccagaaaccagccaactctcactgaagccagatctctcttcctccaccactatgcaggtctctgtcacgcttctgggcctgttgttcacagttgctgcctgtagcatccacgtgctgtctcagccagatgcagttaatgccccactcacctgctgctactcattcactggcaagatgatcccaatgagtcggctggagaactacaagagaatcaccagcagcaggtgtcccaaagaagctgtagtatttgtcaccaagctcaagagagagatctgtgctgaccccaataaggaatgggtccagaagtacattagaaaactggaccagaaccaagtgagatcagaaactacagtcttctataaaattgcatcaaccctaaggacttcagcacctttgaatgtgaacttgacccataaatctgaagctaatgcatccactctcttttccacaaccacctcaagcacttctgtagaagtgaccagtatgacagagaactagtgtgatttggaatgtgatgccttaagtaatgttaaacttatttaacttattgatattacactattcccttccatgaatactagaaatccttaaatgcaagatgtagatccatttttttatttctctgtgaatcctggttcaacactttcaatgtatgagagatgaatgggtaaactttgtgtttgagagtccaaggtattgtttaaaatattattatggatattcctaattattaaaagaaatatattatttttgtac

SEQ ID NO: 202 - DNA, 1748 bp, Rattus norvegicus
  Genbank Accession No. NM_031535
cttagaacctggactcagaccttcataagagccacaaagaaaccaattctgaaccctatcttggctttggatcctggaagagaatcgctaaacacagagcagacccagtgagtgagcaggtgttttggacaatggactggttgagcccatctctattataaaaatgtctcagagcaaccgggagctggtggttgactttctctcctacaagctctcccagaaaggatacagctggagtcagtttagcgatgtcgaagagaacaggactgaagccccagaagaaactgaaccagaaagggagacccccagtgccatcaatggcaacccatcctggcacctggcggatagccccgcggtgaatggagccactggccacagcagcagtttggatgcgcgggaggtaatccccatggcagcagtgaagcaagcgctgagagaggctggcgatgagtttgaactgcggtaccggagagcattcagtgatctaacatcccagcttcatataaccccagggacagcatatcagagctttgaacaggtagtgaatgaactctttcgggatggggtaaactggggtcgcattgtggccttcttctcctttggcggggcactgtgcgtggaaagcgtagacaaggagatgcaggtattggtgagtcggattgcaagttggatggccacctacctgaatgaccacctagagccttggatccaggagaacggcggctgggtaagaaccacgccccttgtgtgtccgccccttgtgtgtctctcctctgtggagatccctaactgccctttttggtctcctggcatggttgttgaagatatcgattattcaggagacattcctggcttactttaataccaggggttaactttgggaatattgatgaccctgtttttaaggaacctgtatttttcattctggctacccttgtggccccgcagtttcatagttttgttccaatttctcggcaaagaaaaacagcctgtgtgtttacttggcttaaaacctaggagagtagcaagttctccctgtgttctgctcactctcacgtaatgggtcaccttggctggggggggaaggtaatataatacctggaggaactgcagagctgataaccccaggctcctgtgtgctcgcatgcatgctattcagaccatttggtcaggcaggagccccactggcttgactggctgaatattgtctgattttagagaaggtggtctgagccaattgtgtttgtgctgtgcccctaagttcattttcaccatggttggcttgtttggggagcccttgctgtgccccaggactttgtacctcactgccctggatcagttggggatctcccagctgctctggcccagtgtttttctgctcagggccctggggcctctttactaaagcactgtttgctgctggcagacacgaaccaggtctgtgaggctccataggaaattaagatttggtgacagactggacgtgggtgtgagtcctgaccctgtcacttaactggccatgtgaccttggtcaggctgacttaccttctgggcctcagcttctcacagactgttgtgactcttaaagataaagcgagcagaagctgacaccagtgagtgccttttcttctgctcacccttgtgctcaccagggtgagatagaggtgagaatgcccttactggtgaccactgtggtaggcatttaccgttcggagggaactccattctggaataggggagaatgcgac

SEQ ID NO: 203 - DNA, 1624 bp, Rattus norvegicus
  Genbank Accession No. NM_031543
gccctagcgcacatggcggttcttggcatcaccattgccttgctggtgtgggtggccaccctcctcgtcatatccatctggaagaagatctataacagttggaacctgcccccaggacctttccctcttcccatccttgggaacatttttcagctggatttgaaggatatccccaagtctttcaccaagttggcaaagcgcttcgggccagtgttcacactgcaccttggctcaaggcgcatcgtggtcctgcatggctacaaggctgtcaaggaggtgctactgaaccacaagaatgagttttctggacggggggacattcctgtgttccaggagtacaagaacaaggggattattttcaataatgggcccacatggaaggatgtgcggaggttttccctaagcattctccgagactggggaatggggaaacagggtaatgaggcccgcatccaaagggaggcgcaattcctggtggaggagctcaaaaagaccaaaggccagccttttgaccccacatttctgattggctgcgcaccctgcaatgtcattgcggatatcctcttcaacaaacgtttcgactacaatgacaagaagtgtctgaggctcatgagtttgttcaatgaaaacttctacctgctgagcaccccctggatccagctttacaataactttgcggattatctacgatacctacctggaagccatagaaaaatcatgaaaaatgtgtctgaaataaaacagtacacacttgaaaaagccaaggaacaccttcagtcactggacatcaactgcgcccgggatgtgactgactgtctcctcatagagatggagaaggaaaaacacagccaagaacccatgtacacaatggaaaatgtttctgtgactttggccgacctgttctttgcaggaactgagaccaccagcacaactctgagatatgggctcctgatcctcatgaaatacccagaaattgaagagaaacttcatgaagaaattgacagggttattgggccaagccgcgtccctgctgtcagagacagactggatatgccctacatggatgctgtggtgcatgagatccagagattcatcaatcttgtcccttccaacctaccccatgaagcaaccagagatactgtgttccaaggatatgtcatccccaagggtacagttgtgattccaactctggactccctcttatatgacagccatgagtttccagatccagagaagtttaaacctgagcatttcctgaatgaaaatgggaagttcaagtacagtgactatttcaaggcattttctgcaggaaagcgtgtgtgtgttggagaaggcctggcccgcatggaattgtttctgctcctgtctgctattctgcagcattttaacctgaagtctctggttgaccctaaggatatcgacctcagtcctgtcacagttggctttggcagtatcccaccccaatttaaactctgtgtcattccccgttcatgagacctgaaaacttcctgatatcccttccattgttatcccttaaactatgactgtttttaaaaaacccaagcatatagagttcctatcataaaatgaaaccgaaaaaataaataaaaccttgatgaattgt

SEQ ID NO: 204 - DNA, 628 bp, Rattus norvegicus
  Genbank Accession No. NM_031545
gcgagacaagagagagcaggacaccatcgcagctgcctggcccatcacttctgcagcatggatctccagaaggtgctgccccagatgattctgctcctgcttttccttaatctgtcgccgctgggaggtcactcccatcccctgggaagtcctagccagtctccagaacaatccacgatgcagaagctgctggagctgataagagaaaagtcagaggaaatggctcagagacagctctcaaaggaccaaggccctacaaaagaacttctaaaaagagtccttaggtctcaagacagcgccttccggatccaggagagacttcgaaattccaagatggcacatagttcaagctgctttgggcagaagatagaccggatcggcgcagtcagtcgcttgggctgtgacgggctgaggttgttttaggaagacctcctggctgcagactccggcttctgactctgcctgcggctcttctttccccagctctgggaccacctctcaagtgatcctgtttatttatttgtttatttatttatttttatgttgctgattttctacaagactgtttcttatcttccagcacaaacttgccacagtgtaataaacatagcctatttcttgcttttgg

SEQ ID NO: 205 - DNA, 1618 bp, Rattus norvegicus
  Genbank Accession No. NM_031557
ggagccatgtcctgggccgctctgctcggccttctggccgtgttattactgttgctgctgctgctgagccgccggcgcgcgcggcgacccggtgagcctccgttggacctgggcagcatcccctggctgggccatgccttggagtttgggaaggatgccgccagcttccttaccaggatgaaggagaagcacggtgacatatttactgtgctggtggggggcaggtatgtcactgtcctcctggacccacactcttacgacacagtggtgtgggatctgcgtacacggctggacttccacccctacgccatcttcctcatggagaggatttttgatctgcagcttccaaatttcaaccccagcgaggagaaggccaggatgaagccgacgctcatgcacaaagacctgcaggcgctcacggaagccatgtataccaacctgcgcaccgtcctgctgggtgactccacagaaggaggcagtggctggcaggagaaaggtctgcttgagttctcctacagctccctgctcagcgctggctacctgaccctgtatggagtggaggcctcaccacgcacccacgagagtcaggccctcgaccgtgaccactcagccgacgttttccgcaccttccgccagctggatctgatgctccccaaactggctcgaggctccttgtcagtgggggataaagaccatgcatgcagtgtcaaaagccgcctgtggaagctgctgtctccagccggactggcctccagggctgaccggagcagctggttggagagttacctgagacatcttgaggagatgggggtatcagaggacatgcaggcccgggcactggtgctgcagctctgggccacacaagggaatatgggacccacggctttctggctcctcctcttcctcctcaagaacccggaagccctcgatgctgtccatgcagagctgaaacgcatcgtctggcaagcagagaagcctgttttacagatgaccgcactcccgcagaagattctagacagcatgcctgtgctagacagtgtgctcaatgagaccctccggctcacggccgcccccttcatcacccgtgaggtcatggcagacctggccttgcctatggcagacaggagggaattctctcttcgacgcggtgaccgccttctcctctttcctttcctgagcccccagaaggacccagaaatctacacagaacctgaagtctttaaatacaaccggttcttgaacccagatgggtcagaaaagaaagatttttacaaagatgggaaacggctaaagaattacaacatgccttggggcgcagggcacaaccagtgcctggggaagagctatgccatcaacagcatcaaacagtttgtggtcctgctgctgactcatttcgacctggagctggtcagtgaggacacagaggtcccggagtttgaccttagcagatatggctttggcctgatgcagccggaggaagatgtgcccatccggtaccgtaccaggctgtgacctgtggagcagacactacactcatctggggcctcctgacttcctgttgttcctccagaatgctgtgtccagaggaggggacagtgagaacaccgagagcaggaaa

SEQ ID NO: 206 - DNA, 2436 bp, Rattus norvegicus
  Genbank Accession No. NM_031561
cggcattgtaattgtacctgtgagttggcaagaagcaagtgctcttccttgattctgctgcacgaggaggagaatgggctgcgatcggaactgtgggctcattactggagccgttattggtgctgtcctggctgtgtttggaggcattctcatgccggttggagacctactcattgagaagacaatcaaaagggaagttgtccttgaagaaggaaccattgctttcaaaaactgggtgaaaacgggcaccactgtgtacagacagttttgggtctttgacgtgcaaaacccagaggaagtggcaaagaatagcagcaagatcaaggttatacagagaggtccttacacatacagagttcgctatttagccaaggaaaatataactcaggaccccaaggacagcactgtctcttttgtacaacccaatggagccatctttgagccttcactgtctgttggcacagagaatgacaacttcacagttctcaatctggctgtggcagctgcaccacatatctacacaaactcatttgttcaaggtgtgctcaacagccttatcaaaaagtccaagtcttctatgttccaaacacgaagtttgaaggaactcttgtggggttacaaagatccattcttgagtttggttccatatcctataagtaccacagttggtgtgttttatccttacaataacactgtagatggagtttataaagtttccaatggaaaggataacataagcaaggttgccataattgatacctataaagggaaaaggaatttgtcctattgggaaagttattgcgacatgattaatggcacagatgcagcctcctttccacctcttggtgagaagtctcgaacactgaggttcttttcctctgacatttgcaggtccatctatgctgtgtttgaatctgaagtgaaccttaaaggaatccccgtatacagatttgttcttccagccaacgcctttgcctccccactccagaacccagacaaccactgtttctgcactgaaaaagtaatctcaaataactgtacgtcgtatggtgtgctggacattggcaagtgcaaagaagggaaacctgtgtacaattctcttccacatttcctacatgcaagtcctgatgtctcagaacctatcgaaggcttgaatcctaccgaagatgagcataggacatacttggatgtggaacccataactggattcactctacagttttccaaacgactgcaggtcaacatactggtcaagccagctagaaaaatagaagcactgaagaatctgaagagaccttacattgtacctatactgtggctaaatgagactgggaccatcggcgatgagaaagcagaaatgttcagaaaccaagtgaccgggaaaataaagctcctgggcctggttgagatggtcttacttggtgttggagtagtgatgtttgttgcttttatgatttcatactgtgcttgcagatctaagaatggaaaataagtagtggatgagcctacattatgcactagctacatttttggtaaaaccaatctccaaaacgaagacttaagacatgcttgtttttataaaacacacctatctgtagttgaagaaacggtggtgtgcgcgctctctctcttattgcagatatatattcattcatatattgcaataagccacagcatattttgacaagatcaatatgtcactaagcctatatttttaataaaatcttgtattttgttaagtccatcatctgcaactgagtggacttcaatttctgcagaactaattatcttttttggttctgatttactgatttttttttcctgttgccaaatttcaagaatgtatatattctaagaaacgctttgttcctcatcgaagtaaactgttatcatgtctggggtgaccctttcatttatagcaaatgttccttgtgactgtcagcacatgatatgtcatttattacatcattttaaagatttaaggatgaaaaatgaacaattcacatatgaaccattgctaatatattgtttaagcctctccctctctggtgtccttggcaacaacaaggccaggtatcacagatattttttctttttactttcttaacacagagcttaatatgttctgttcctcgccatgaaatgaactatttttagcacattttagctcttgaattttaagtatgttgtcaagttccaggctgcctagctcttttgaaaactgagtaggtttttctctttctgctcagccacaactaatgtaacttcagagagctgttatagtggtaaaagatgtaatttataataaatggattatgatatagaatcttacaaaagctagaattggctttaaatatgtatttgtggtaatatattctgcttttataatcacccagaaataactggtttctaacattaaagatgttcttaaattcc

SEQ ID NO: 207 - DNA, 2638 bp, Rattus norvegicus
  Genbank Accession No. NM_031579
cacaatcttcaatgagtagacatattcctcagttctgtggtgttctcggtcacacatttatggagtttctgaagggcagtggagactactgccaggcacagcacgacctctatgcagacaagtgaactgtagaaattcattactactccaccaagaagcccccataagagtggatagcctggacacagtcgtgttgaattgaaatctgcagagcattttccaagagctcagacctggatggggtaaacctcagtgcacttcctctgtatcgcctcagtattcctggattgaagagtcactgcttcttgtgaggaggttcatttcattgcccgtttctcccgactcatactcaaagcactgagaatttcaagtggagtatattgaatattgaagtagacttcaggttgttttttggttttgttttggttttttgttttgttttgttttgttttgttttggttttcagtttttgtttggaatcatttctgtattcaattttttaattctttcataaccctattgggtgtttttttaaactaaattaacatggctcgaatgaaccgccctgctcctgtggaagtcacatacaagaacatgagatttcttattacacacaatccaaccaatgcgaccttaaacaaatttatagaggaacttaagaagtatggagttaccacaatagtaagagtatgcgaagcaacttacgacactactcttgtggagaaagaaggcattcatgttcttgactggccttttgatgatggtgcaccaccatccaaccagattgttgatgactggttaagtcttgtgaagattaagtttcgtgaagaacctggttgctgtattgctgtccattgtgtcgcaggccttggcagagctccggtgcttgttgccctagcattaattgaaggtggaatgaaatatgaagatgcagtacaattcataagacaaaagcggcgcggagcttttaacagcaagcaacttctgtacctggagaagtaccgtcctaaaatgcggctccgcttcaaggattccaacggtcatagaaacaactgttgtattcaataaaactggggtgcctgatgccattgccttggaagaggaacttcagatgggacctgatttgttatttacccaatgtgtccacttacctgtggaagctccaggggaatattgaaaaagttttaccaggccacaagcttgacagaattgcaacctctataattgggctatgatcaacacgtttggacacttagcaaaagatttttgctggtcagcatttaaaatgtgcttattatttgtaccaattgacctttcctaaaataaggtattgagtaatgtcattaaatgtactcctgtgccagaatattattagtctataaggaatttagaaggattaggtgccaaaatacccagcacaatacttgtatatttttagcatcatacagaaccaaaattccaagaactaagaactctccagaccttccatggtgtattccttcagtcatttcaaacaccgcagggcttctcttgttatctgcctgctcactctatgtttacatctcccacacttacaccagaacacatcaggtttgcttagctatcttttaagtcttgcaatgattatttaatgtctctgtcttattttgtgctgttttgggaaacctccatttgaaaatcaactttgttacagaagcacatatcttcaataatgtctccagacaaaaagccttatagttaatttaatgtttgcactcgggtgcaacctgacagggagggcctgaacaagaaaggagaggaggctattaaatatttttagtaatatgttgcctttgtcttgtgcagaacatgtagagtatgctctttaatttagtaaatatttttaagacgtagagatacattgttgtagctaaccacttaatcaaaatttctgaaattcttgtgttttccatacctatctgaggttttccaacttgtttgaattatggttttccccttctcttcccaatctcttgcaaaaaagtaaaagtgggatctgctagtgaactgagcagaaatattttatacgccttttgagctatgtaacttaataattggatacttgatcatttgttttattatgtaatcgataaaatggtgatgtgtattaatgttagttcaaccatatatttatactgtctgggaatgtgtggttatagttctgtgggagaaatagtttgtcagtgttcaccagcttgtaaaaacttagtgcgagagcttcaacatctaaataaatgatgaaacgcattcgtcactgaggtcactttgcttaaaattaacttaatttgtagaaaacagtggattcaattattatcatttcagtttatggacaaatttgttagggttaccaagtgcgtttaaaaattgctctttaaaggtctagataattgtgaatcaattgaatgttgggtaccaagggaaaacggtttgtaatagttgatgaccttgatttttaattcaattccaccagtcacttgtagctttatgcagtttccaatccacttttctcatttttaagtttattacttacctgtatatattttgaaattaatttgaacctgcgtatttggcacatgatggcttataaattttaactttc

SEQ ID NO: 208 - DNA, 3360 bp, Rattus norvegicus
  Genbank Accession No. NM_031614
gccttgcagcggcgcgggcaaacggagaggccgcgggaggcgcgaagccggcagaaggcgagggagagcggagggcggccatggtccagccctgaagccaaacaaaaaaggcctacttcgaaagctgtcaacaatgaatgactctaaagatgcccctaagtcctatgacttcgacctgatcatcattggaggaggctcgggaggcctggcggcagctaaggaggcagccaaatttgacaagaaggtgatggtcttggacttcgtcacaccaactcctctcggaacgaatgggggtctcgggggaacgtgtgtgaacgtgggctgcatacctaaaaaactgatgcaccaggcggctctgttaggacaagctctgaaagactcacgcaactatggctggaaactcgaggacacagttaagcatgactgggagaaaatgacagaatctgtgcagaatcatatcggctcgctgaactggggctaccgagtagctctccgggagaagaaggtcgtctatgagaatgcttacgggaaattcattggtcctcacaaaattatggcaacaaataacaaaggtaaagaaaaagtttactcagcagagcggttcctcattgccaccggtgaaaggccacgctacctgggcatccctggagacaaagagtactgcatcagcagtgacgatcttttctccttgccttactgcccggggaagaccctagtggttggcgcgtcctatgtcgccttggaatgtgcaggattcctggctggtatcggcctcgacgtcactgtaatggtgcggtccattctccttagaggatttgaccaggacatggccaacaaaattggtgaacacatggaagagcatggtatcaagtttatcaggcagttcgtgccgacgaaaattgaacagattgaagcagggacaccaggccgactcaaggtgaccgctaaatccacaaacagtgaggagaccatagaagacgaatttaacacagtgttgcttgcagtaggaagagattcttgtacaagaactattggcttagagaccgtgggcgtgaagatcaatgaaaagaccgggaagatacctgtcacggatgaggagcagaccaatgtgccttacatctacgccattggtgacattctggaggggaagctggagctgacccccgtggccatccaggcggggagattgctggctcagaggctgtatggcggctccactgtcaaatgtgactatgacaatgtcccaacgactgtgtttactcctttggagtatggctgctgtggcctctctgaagaaaaagctgtagagaaatttggggaagaaaatattgaagtttatcacagtttcttctggccattggaatggacagttccatcccgggataacaacaaatgttatgcaaaagtcatctgtaaccttaaagacaacgaacgtgtcgtgggcttccacgtactgggtccaaatgctggagaggtgacgcaggctttgcagccactcaagtgcgggctgaccaagcagcagctggacagcaccattggcatccacccggtctgtgcagagatatttacaacgctgtcggtgactaagcgttctgggggagacatcctccagtctggctgctgaggttaagccccagtgtggatgctgttgccaagactacagaccattgcttgcttccttgtccacacccaggtgaagttcaggaaggctcttgggttcttggcaccaattcaaggtgctatcctaaggccaccaggtccctgggatcttgtgggtaggaggtggcaggtagaagaaggctgcagcatcgcactggggtcaccatgacggactcagactgacattcggcagagcatcacggtgcgtccatgaagtcactagcctcaagcccaagtggtgggcagtgacagaaagctgtcgatctgttgggttcaacctttccctgtagactgttttagtctcgccttcaagctatgtaatgtcaattctgttttttcttttctccatggggttaatgatactagaggtagggaatgttagcaatcagtttttgtcatggctggactatccacagcacggtcgttactgtgtggaagggggtcagatggcttatgagagccaaaccagtttatcctgagaaagacgaattaccctgtggctaaaatacactgtttttactaacctgtgtagcattgtcccctttaataagtttaggtcttctgtccaaactgagaaaaaccatggtcactttggcaaatttccggcagtgtgtgtccctgccgctgcttagcaagggcggcggtgacttggctaatctactcagactcattgcatggctcttgggtatcatggagtattccagcatagagcctgaccagcagtaaatgtctctcctggtacagttactgtctgctggactaagtgcgctgagatggttctcaatggagaatgcttaatttgcttttaacctcttgtttttgtgaggtgggtttagttttaagcttatgtcccataagaactccattcacaggcaagcagctctttccgcacacagcatatgcatcttctgaggtaatggctttataaggaagctgttcataacataagttattattattattgaacacaggtggatgtgaaggattttttttcattgaagaaccaaatggtttttcttttttctgttcagtgagcccacagagaccctggcaggaacagcattgctggcagcattgctgctgggcttttccagtgtagttcttgctcctaggtcacgtgacagcgaacacgatgcctgaggaccgcgcagacaggtttcccaccgcacagccgcccaaggtcccgccatggtccggtagctccttttcttgtcctcccctctgcccatctccacctgcagtactgagtggcgtttcccagtaccctttggggccacctcagggaacgggtttgcctggtattcagccagcggcacccaccctgccccacgaggctccctcagatccgccccacatccgtgtgttgaagaggagaaaggaccagggaaccaaaggagtggactgttgagttttatttatttattttttgtttttttttctcctaagtctgccagtctctgagatcagaacgacagtgtagggtagccgcctaatcatgttgtgattctattggtgggatgaaatgttccgcccccatggaaggagtacactcgtcgtttatgttctgtaatcgcacaatgtactgtaacccaaattccaattccatgtatttttattacagtttctctgggaaaaaaaaatgtgaaacaataaaaaggtgttgattcacgaaaaaaaaaaaaaaaaaaaaaaaaaaaaaaa

SEQ ID NO: 209 - DNA, 4400 bp, Rattus norvegicus
  Genbank Accession No. NM_031628
ccgagtctcctgcctcccgccccccacccctccagcgcctgctcctcctccgctccccatacacagacacgctcacacccgctccttcacttgcacacacagacacacgcgcgctcacacgctccgcacacacactccactctctcccgcgcgctcacacccctctctctcggcgccctcgccggtgtcgcgccgcgccgcgccgcagccggacgcccctccagggctcactttgcaacgctgacagagcgggcagtggccgtggaggtgggaaacgtggcgacatcctagcccctggtcgcagccggagactggacgctgcggaacctctcggcggcgctctcccatgagttgggatcgcagcatccccagccagccgctgctcaccgcctctgggagccgctgggtttgtgcaccgcagcccttccgggacagcagctgtgactctcccccaatccagatttcggggtcgctctctagaaactcgctctaaagacggaacctccacagaacccaaagcccactgcgggagagcgcagcccgacaagcccgggcgctgagcctggaccctcaacagagcgggccagcacagcggcggcggctgcttcgcctatcccgacgtccccgcctcctacactctcagcctccgctggagagacccccagccccaccattcagcgcgcaagataccctccagatatgccctgcgtgcaagcccaatatagcccttcgcctccggggtccacttatgccacgcagacttatggctcggaatacaccacagaaatcatgaaccccgactatgccaagctgaccatggacctcggtagcacggggatcatggccacggccacgacgtccctgcccagcttcagtaccttcatggagggctaccccagcagctgcgaactcaagccctcctgcctgtaccaaatgccgccttctgggcctcggcctttgatcaagatggaagagggtcgcgagcatggctaccaccaccaccaccaccatcaccatcatcatcaccaccaccaccagcagcagcagccgtccattcctcctccctctggccccgaggacgaggtactgcccagcacctccatgtacttcaagcagtctccgccgtctacgccgaccactccaggcttccccccgcaggcgggggcgctgtgggacgacgagctgccctctgcgcctggctgcatcgctccgggaccgctgctggacccgcagatgaaggcagtgcccccaatggccgctgctgcgcgcttcccgatcttcttcaagccctcaccgccacaccctcccgcgcccagcccagccggcggccaccacctgggctatgaccccacggccgcagctgcgctcagtctacccctgggagccgcggccgccgcgggcagccaagctgctgcgctcgagggccatccgtacgggctcccgctggccaagaggacggccacgttgaccttccctccgctgggcctcacagcgtcccctaccgcgtccagcctgctgggagagagccccagcctaccatcgccacccaataggagctcatcatccggcgagggcacgtgtgctgtgtgcggggacaatgctgcctgccagcactacggagtccgcacctgcgagggctgcaagggcttcttcaagagaacggtgcagaaaaacgcaaaatatgtttgcttggcaaataaaaactgcccggtagacaagagacgtcgaaatcgatgtcagtactgcaggtttcagaagtgtctcagtgtcgggatggtgaaggaagttgtgcgtacagatagtctgaaagggaggagaggtcgtctgccttccaaaccaaagagcccactacaacaggagccctcgcagccctccccaccatctcctccgatctgtatgatgaacgcccttgtccgagctttaacagacgcaacgcccagagaccttgattactccagatactgtcccaccgaccaggccactgcgggcacagacgctgagcacgtgcagcagttctacaaccttctgacggcctccatcgacgtgtccagaagctgggcagaaaagatccccggattcactgatctccccaaagaagatcagacgttacttatagaatcagcctttttggagctgttcgttcttagactttctatcaggtcaaacactgctgaagataagtttgtgttctgcaatggacttgtcctgcaccgacttcagtgccttcgcggatttggggagtggctcgactccattaaagacttttctttaaatttgcagagcctgaaccttgatatccaagccttagcctgcctgtcagcactgagtatgatcacagagcgacatgggttaaaagaaccaaagagagtggaggagctatgcaacaagatcacaagcagcttaaaggaccaccagaggaagggacaggctctggagccctcagagcccaaggtccttcgcgcactggtggaactgaggaagatctgcacccagggcctccagcgtatcttctacctgaagctggaggacttggtgtccccaccttctgtcatcgacaagctcttccttgataccctgcctttctgagcaggggaagcctgagcagagagctacttgctctgctggcactggtcattaagtgagcaaaaggatgggtttgaacacctgcccctctatccttcctccaggggaaaaagcagctcccatagaaagcaaagacttttttttttcctggcacctttccttacaacctaaagccagaaaccttgcagagtattgtgttggggttgtgttttatatttaggctttggtgggtgggctgggagggggtaaaatagttcatgaggcttttctaagaaattgctgacgaagcacttttggatgatgctatcccagcagtggggtggggagaaaggataatataactgttttaaaaactctttccgggggaatatgactatggttgctttgtatttaaaaataagaacagccaagggctgttttaccagggtagggctgtgtcttaagactgatccctttagtatgtacttcccggatcgaggcacataagtggtgcaaatgaggcggggaaattcttcatttcttcatttctttcttcttcttaaaataaaatggcaaaaaaaaaaagatggaagattatctacaaatcagacttagcaaaatgataatggctattcgcttccacatacaagtgcaattttttagagtgctgtcttactaagtcttgtttgtgaactctccctcattttatatgaaaataagaaggaggcagtcatgttatcaaacggcgtgctcattttcctagctcacccttggtccacctgccctgtagaacccttcggaggtatggcccttctaagactttcaggccactcttgatggaattcgacacccctcccctcaacccatgactatccagatgtcctgaatggggatcaggttataaaatggattgcatatgactgtgttcgctgtgtgtttgtcaacctggacagagttctctaaaccttctttagttgtagcaagttcctgattcctccattcagaagcccaaggagcattgggtgactcgatcaagggttaaccctaggagaacatgcaaataagtaggaactgggtcagacagggtaagcaccagagatgataaggatttatatataaatatatataaaattaatttttgttattggttatagacaattttggaaagcaagagaatcatctcttttttttttttaaagaggaaaagatagtattgatgtattagcaaagattagtggggtacggttcaacattccgtgtttgtgcccccttttctatgtttctactgttgatggcatattattatgaaatgattcgttgcatagtgtccttatttgtatgaacatttgtatgcacgttctattgtaatcgctttgcctgtatttattgcaagaccaccagctcctggaggctgagttacagaataatcaaatggggtgttcgtggtgacttggatacaccggttagaaattaaataagcatatatatatatataaaaacatagcaggttacatatatatttataatgtgtctttttattaaccatttgtacaataaatgtcacttcccacgcagttattttatcctttgtttgcagtgacctttaaggcagcactgtttagcactttgatatgaaattttttgcttatttttttgctaaattcaaataacgtttgaagatttttaggtctaaaagtctttatattatatacactgtatcaagtcaagatacctttggccgttttgctaagactcaaactttgaatgtcaaaccaatgtcacggtagcttctgttagcttttaatcatttttgctttagtctttttttttaaaaaaaa

SEQ ID NO: 210 - DNA, 2881 bp, Rattus norvegicus
  Genbank Accession No. NM_031664
ccacgcgtccggtcttgctgaagggaaacctccacttcctgcttgtgagagtattaatccctgctgcagctgtccatccccactgacatcagactccagtttctccaggatccagtgtgttctgaagatcagcagctctcccggagtcttcaaggcgccagatttggaagtctgaggcatctggctttgtaacctgagcagctgccaggttccagccattatctgactgggctgtgcggacccacccagcacattcagaggataacaggagatggcgaagtcagagggaagaaagtctgcttcccaggacacatcggagaatggcatggagaacccaggcctggagctcatggaagtcggaaaccttgagcaaggcaaaacactggaggaagtgacacagggacatagcctgaaggatggcttggggcattcctctctctggaggaggattcttcagcccttcaccaaggcgagaagtttctatcaaagacatgctggtttattcaaaaagatcctgcttggtctcttgtgtttagcgtatgctgcctacctcctggcagcttgcatcctgaacttccggagggcactggccttgtttgtcatcacctgccttgtcatcttcatcctggcttgccactttctgaaaaaattctttgctaaaaagtcaataagatgcttgaagcccttgaaaaacacccgcctgagactttggcttaagagggtgttcatgggagccgctgttgtcggccttattctctggctggctctggacacagctcaaaggccagagcagctgatctcctttgcgggaatctgcatgttcatcctcatcctctttgcctgctccaaacaccacagtgcggtgagctggaggacagtgttttggggcctgggccttcagttcgtctttgggattttggtcatcagaactgaacctggatttaatgcatttcaatggctgggagatcagatccagattttcctggcatatactgtagaaggatccagttttgtttttggtgacacactggtccaaagtgtttttgcttttcagtctctcccaatcattattttcttcggatgtgtgatgtctattctctactacctgggccttgtgcagtgggtgatccagaagattgcctggttcctgcaaatcaccatgggtaccacagctgcagagaccctggccgtggcaggaaacatctttgtgggaatgacagaggcacctctgctcatccgtccctaccttgcagacatgaccctctctgaaatccatgcagtgatgactggaggctttgctactatagcaggcacagtgttgggagccttcatatcctttgggattgatgcatcatccttgatttctgcctcagtgatggctgccccttgtgcacttgccttgtccaaactggtatatccagaagtagaagagtccaagttcaagagcaaggagggagtgaagctgcctcgaggggaagagaggaatattctggaagccgcgagcaacggagccacagatgccatagcgcttgttgctaatgttgcagccaacctgattgcctttctggctgtattggccttcatcaattctaccctttcctggctgggggaaatggtggatatccatggactcactttccaggtcatctgctcctatgtcctaaggccaatggttttcatgatgggtgtacagtgggcagactgcccattggtggctgagatagtgggagtcaaattcttcataaatgaatttgtggcctatcaacaactgtctcagtacaagaacaaacgtctctctggagtcgaagagtggatcaatggcgagaaacagtggatttctgtgaaggctgaaatcattgcaacattttctctctgtggatttgccaatcttacttccatagggatcacactgggaggcttgacatccatggttccccaacggaagagtgacttgtgcaagcttgtggtcagggccctcttcacaggtgcctgtgtttccttcatcagtgcctgtatggcaggaatcctctatgttcccagaggcgctgaaactgactgtgtctcattcttaaacacaaatttcaccaacagaacctatgagacatatgtgtgctgcagagagctcttccagagtactttgctgaatggcaccaacatgccttctttctcaggcccctggcaagacaaggagtccagcctcaggaatcttgctaaatgctgtgacctctataccagcactgtgtgtgcctgaggctggtggggccattccgtgacagttcttatagaacagattcatattaccaaatacatgttcatgtacttaggcttattctctgagaactgcactaaactccacaaaatgaaagtcctgatctcactgtggctctgtataaaaaccagcatccacctttccactggcatgccacatagtagatgtgaaattcattatagaccctcttgagccaaagtatggtgggaatgtagctaagggggaaatatgtgtgtggtaagtgctaagatggagattcaacccctggccagggccagagtggggagagtggggaaatccaagtagatgcttagatttaacttggtggtacaccctgtggtcacttacctgtaagctcagagctaaggggattgcctcagatccaaggcaagcctggcccgaaccctgaagtctttcacagaagtgatagagtagaggccatgtccttgggcagggatggaggtgagggaatatatttctaaagttatatgggaaacacttgtgaatacttaatgataacatattttttattgccaaaggttgtatacttaaaaactcttttcattttcatacattactaaaaagctttctgtaataaagtgtttttatgta

SEQ ID NO: 211 - DNA, 840 bp, Rattus norvegicus
  Genbank Accession No. NM_031677
atgactgaacgctttgactgccaccactgcaatgagtctctctatggcaagaagtacattctaaaggaggagaacccgcactgtgtggcctgcttcgaggagctctatgccaacacctgtgaggagtgtggaacacccatcggctgtgactgcaaggacttgtcctacaaggatcgccactggcatgaaggctgcttccactgctcccggtgcgggagctcgctggtggacaagccctttgcggccaaggaggagcagctgctgtgcaccgactgctattccaacgagtactcgtccaagtgccaggagtgtaagaagaccatcatgccaggtacccgcaagatggaatacaagggcagcagctggcacgagacctgcttcacctgtcagcgctgccagcagcccatcggaaccaagagcttcatacctaaggagaatcagaacttctgcgtgccctgctatgagaagcagtatgccctgcagtgtgtgcagtgcaaaaagccaattaccacaggaggtgttacttaccgggatcagccctggcacagggagtgctttgtgtgcacagcctgcaagaagcagctatctgggcaacgcttcacagcccgggatgagtttccatactgcctgacctgcttctgtgacctgtatgctaagaagtgtgctgggtgcaccaaccccatcagtggtctgggtggcacaaagtacatctcttttgaggaacgccagtggcacaacgactgctttaactgtaagaagtgctccctgtccttggtggggcgaggcttcctcacagagagagacgacatcctctgtcctgactgtggaaaggacatctga

SEQ ID NO: 212 - DNA, 1766 bp, Rattus norvegicus
  Genbank Accession No. NM_031684
caccatgacaaccagtcaccagcctcaggacaggtataaggctgtctggctcatcttctttgtcctgggtctggggacactgctcccctggaatttttttataacagcaacccagtatttcacaagccgcctgaacacgtcccagaatatatccttggtcaccaaccaatcatgcgaaagcaccgaggccttggctgacccctcagtgtccttgccagcccggagttctctcagtgccatcttcaacaatgtcatgaccctgtgtgccatgttgcccttgctgatcttcacctgcctcaactctttcctgcatcagaaggtgtctcagtcccttcggatcttgggcagcctgctggctatcctgttggtgttcctcgtcactgccaccctggtgaaggtgcagatggatgccctgtccttcttcatcatcaccatgatcaagattgtgctcattaactcatttggtgccattttgcaagccagccttttcggtctggcaggcgtcctgccggccaactacacagcccccatcatgagtggccagggcctggctggcttcttcacctctgttgccatgatctgtgccgtcgccagtggctctaagctgtcagaaagtgcttttggttacttcatcacggcctgtgcagttgtcattctggccatactgtgttacctggccctgccttggatggaattctaccgacattacctgcagctcaaccttgcggggcctgcagagcaggagaccaagttggatctcatcagtgaaggagaggagccaagaggaggaagagaggaatctggggtgccaggccccaactctctacccgccaacagaaaccaatccatcaaagccatactgaagagtatctgggtcctggctctgtctgtctgtttcatcttcacagtcaccattgggttgttccctgctgtgactgctgaggtggaatccagcatcgcaggcacaagtccctggaaaaactgctacttcatccctgtggcctgcttcctgaatttcaatgtctttgactggctaggccggagcctcacagctatttgcatgtggcctggtcaggacagccgctggttgccggtcctggtcgcctgcagggttgtgtttatccccctgctgatgctctgcaatgtgaagcagcaccactacctgccctccctctttaagcatgatgtctggttcatcaccttcatggccgcctttgccttctccaatggctacctcgccagcctctgcatgtgcttcgggcccaagaaagtcaaaccggctgaggcagagactgccggaaacatcatgtccttctttctgtgtctgggcctggctctgggagctgtgttgtccttcttgttaagggcacttgtgtgagcgaccctgtgtggacagaggaactacactgcctgcttcctgctcacttccttcgctgttagggacgagcaggggtccagagggctgctcttctgctttcctccggtgctgggcccagatgtccaggaacaaaggagggagcctctgaggatggacttgggattgggggtcagagtggtagggggacaatggtctctgacggacagctctgactgatccctgcctaagccaagcacaagagactccacaaggatggggtggagacagatggctgactgtgtatcatgatctgatgtcccttgcccttctttcttctgtgcctgttccaggtccccgatccttgtcattttactgccttttttatactgacagaaaccaggtgccttca

SEQ ID NO: 213 - DNA, 2234 bp, Rattus norvegicus
  Genbank Accession No. NM_031698
ctcggaggaatggcgccgccgggttcaagtgctgtcttcctgttggccctgacaatcacagccagcacccaggctctgacccccacccactacctcaccaagcatgatgtggaaagactgaaagcctcactggatcgccctttcacgagcttggagtctgccttctactccattgtgggactcaacagccttggggcacaggtgccagatgtcaagaaagcgtgtgccttcatcaagtcaaaccttgatcccagcaacgtggattctctcttctatgctgcccaatccagccaagtcctctcaggttgtgagatatctgtttcgaatgagaccagagatctgcttctggcagcagtcagcgaggactcctccgttgcccaaatctaccatgcagttgccgccctcagtggctttggtcttcccttggcatcccatgaagcccttggtgcccttaccgctcgcctcagcaaggaggagactgtgctggcaaccgtccaggctctgcacacagcatcccacctatcccagcaggctgacctgaggaacattgtagaagagatcgaggaccttgttgctcgcctggacgaactagggggtgtgtatctccagtttgaggaaggcctggaacttacagcattgtttgttgctgccacctacaagctcatggaccatgtggggactgaaccgtccatcaaggaggatcaggtcatccagctcatgaacacaatcttcagcaagaagaactttgagtccctctcagaagccttcagtgtggcctctgctgctgctgcattgtcccagaatcgctatcacgtaccagtggtggttgttcctgagggctctgcttctgacactcaagaacaggctatcctgcggttgcaagtcagcagtgttttgtctcacgctctggctcaagccgcagttaagctggaacatgctaagtccgtggcttccagagctactgtcctgcagaagatgcccttttcacttgtaggggatgtttttgagctaaacttcaagaatgttaaacttcccagtggctactatgacttctctgtcagagttgaaggtgacaaccgttacattgcaaacactgtagagcttagagtcaagatctccactgaagttggcatcaccaatgctgatctttccactgtggacaaggatcagagcatcccacccaaaactacccgggtgacctacccagccaaagccaagggcacattcatcgcagacagccatcagaacttcgccctgtttttccagctggtagatgtgaacaccggtgcggagctcacccctcaccagacatttgttcgacttcataaccagaagactggccaggaagtggtgtttgttgctgagccggataacaagaatgtgcataagtttgaactggacacctctgaaaggaagattgagttcgactctgcctctggcacttacacactctacctaatcatcggggacgccactttgaagaaccccatcctctggaacgtggctgatgtggttatcaagttccctgaagaagaagctccctccactgtgctgtcccagaacctttttaccccaaaacaggaaattcagcacctgttccgagagcctgagaagaggccccccactgtggtgtccaatacattcacggccctcatcctctcgcccttgctcctgctctttgcactgtggatccggattggagccaatgtctccaacttcacctttgctcctaccacgattatctttcacctgggacatgctgcaatgctggggctcatgtatgtctactggactcagctcaacatgttccagaccctgaagtacctggccgtcctgggcactgtgacatttctggctggcaaccgaatgctggcccagcaggcagttaagagaacagcacattagttccagaagaagtttgaagaccctgaactcggaaatgaccgtttaacaaagagtggagacagttcagagtgtggaaagaatcgggggacagaataggagaagaggaaatacctgttatttaaagagagaaaagtcgagctatgcttacacgtttacttgtttctcactttttgcttcactgaacagatatgtttggacccagattgtctgtccctttgttgtgatgcctggccagattctgtgaatatcccaggttacccagaggttgtatttgaaaagttgaaatctgtaattcatcagctttggaataaagagaatggtggactccc

SEQ ID NO: 214 - DNA, 499 bp, Rattus norvegicus
  Genbank Accession No. NM_031709
tgttttcccctgccgccgccaagttccgcggagaagctccggggtgcgttcaagattcggcgtcacccgtaatccaccgccatggccgaggaaggcatagctgctggaggtgtaatggacgtcaacactgctctacaagaggtgctgaagaccgccctcatccacgatggcctagcacgtggcatacgcgaagctgccaaagccttagacaagcgccaagcccatctctgcgtgcttgcatccaactgtgatgagcccatgtatgtcaagctggtggaggcgctcttggccgagcaccagatcaacctgataaaggttgatgacaacaagaaactaggggaatgggtaggcctctgtaaaatcgatcgagaggggaagccacggaaagtggttggttgcagttgcgttgtagttaaggactatggcaaagaatctcaggccaaggatgtcatcgaggagtacttcaaatgctagaaatgaataaataaaattttggctc

SEQ ID NO: 215 - DNA, 1399 bp, Rattus norvegicus
  Genbank Accession No. NM_031719
ctgctttcttggttcctgtggagcaatgctttcgcccgcaatgagcttcctcaaaagcttcccgccccctgggtccgcagatggactccggctgcagcagccagacaccgaagctgtgctgaacgggaaggggctcggcaccggcacgctttacattgcggagagccgcctgtcttggctagatggttctggattaggattctcactggagtaccccaccattagtttacatgcggtatccagggacccaaatgcttatcctcaagaacatctgtatgtcatggtgaatgccagatttggagaagaatcaaaagaacctttctctgatgaagatgaggacgacaatgatgatgttgaacccatttctgagtttagatttgtgcccagtgataagtcagcattggaggcgatgttcacagcaatgtgtgagtgccaggccctgcatccagaccctgaggatgaagactcggatgactatgatggagaagagtatgatgtggaagcacatgagcaaggacagggggacatccctacattttacacctatgaagaaggactatcccatttaacagcagaagggcaagccacgctggagagattagaaggaatgctttctcagtctgtgagcagccagtataatatggcaggcgtccgaacagaagattcagtaagaacttacgaagatggcatggaggtagagaccacaccaactgttgccggacagttcgaggatgcagacgttgaccactgaggatgactcgtgtgacttacaattctgctcataactataggcaagaacttgatgcctcttcactccagaatggagctggtgaaaggctttttttcttctccaaaactcatttctcaagacaaactataatgagacagcaagctgtcaccagcagaaaagactttgacctctattaacaaaggtgaattaactgaacgggtttttgtagtttctcatttacccctaagcttcctgtgtctagttatcttctgagagcctctaattcctgctttgctgtgtgcaatctgtcagctacgaggctgtgtgtcgtgtgcacagtctcacgctggcaaaagtgaggtgggagcttagatgtctctgggacttaggaggactctctgatccctgagataaaaagcaaaggcctctgagggcacagctttagcattctccacggacgcatgggccctctactggggctcaaccacatctcgtcatgacaaatgcttgtgtgctacttctgttcctccgcatttaccatcagctctgttacattctcctagcttaggtccttgactgtcacagagtaaatcatctgaaatgaagtctgcaaagtactctcaatgatattttgtctttgtaatagttaaataaatctgggttttctat

SEQ ID NO: 216 - DNA, 643 bp, Rattus norvegicus
  Genbank Accession No. NM_031723
aaagggcagcggttcctcttggtgattgtatcgcgccctcttgctgctaattaccgcgttctccattcctccacatgctgtctctagactttctagatgatgtacggcgaatgaacaagaggcagctgtactaccaagtcctaaattttggaatgattgtctcctcggcactaatgatctggaaggggctgatgttgataaccggaagtgagagtccaattgtagtggtgctcagtggcagcatggagcctgcgtttcacagaggggatctccttttcctcacgaaccgagttgaagatcctatacgtgtgggggaaatcgttgttttcaggatagaaggaagagagattcccatagtgcatcgagtcttgaagatccatgaaaagcaagatgggcatatcaagtttttaaccaaaggagataataatgccgttgatgaccgaggcctctataaacaaggacaacactggctggagaagaaagatgttgtagggagagcaagagggtttgttccgtacattggaatcgtgacgatcctcatgaatgactatcctaaatttagttatgcagtactgtttctgctgggtttatttgtgctggtccatcgtgagtaagaagccggcctcgctggtcctgggaggct

SEQ ID NO: 217 - DNA, 1568 bp, Rattus norvegicus
  Genbank Accession No. NM_031776
aagagccagcagctccccgctctgcagccacagggaccgaccgctctgcgcccgcccggtgcaccctctttggtcagtgaacttgcgctgccccgctgctgccatgtgtgcggctcggaggcgcgagctggcgctcatcttccgagggactttcgtccactccacctggacctgccccatggaggtgcttcgcgatcaccttcttggcgtgagcgacagcggcaaaatagtgtttctagaagaatcatctcagcaagaaaagctggccaaagaatggtgcttcaaaccgtgtgagatcagagagctgagccaccatgagttcttcatgccaggccttgttgatacacacatccatgcccctcagtatgcctttgctggaagcaacgtcgacctgccacttttggattggctgaacaagtatacatttcctacagaaaaaaggttccagagcaccgatgtggctgaagaagtctacactagagtcgttaggagaacactaaagaacggcaccaccacggcatgctactttggaacaattcacactgactcatccctgatccttgcggaaattacagataaatttgggcagcgagcatttgtgggcaaagtatgcatggatttaaataacactgttccagaatacaaggagaccaccgaggagtcagtcaaggagacagagagatttgtgtcagaaatgcttcaaaagaattattcaagggtgaaacccatagtgaccccgcgattttctctttcttgcacggagactctgatgagtgaacttggcaacatcgccaagactcatgatctgtacatccagagccatataagtgaaaatcgtgaagaaattgaagctgtgaaaagcttataccctggctacaaaaactacacagatgtctatgataaaaacaatcttctgacaaacaaaacagtgatggctcatggctgctacctttctgaagaagagctgaacgtcttcagtgaacgaggagcatccattgcacattgtcccaactctaatctgtcgctgagcagtggcttactgaacgtgctcgatgtcctgaagcataaagtgaagatagggcttgggacagatgtggctggtggttactcctattccatgcttgacgccatccgaagagcagtgatggtttccaacgtcctcttaattaataaggtgaatgagaaaagcctcaccctcaaagaagtcttcagactagccactcttggaggaagccaagccctggggcttgatcgtgaaattggaaactttgaggtcggcaaggattttgatgccctcttgatcaaccccagagcatcggactctcccattgatctgttttgtggggatttcgttggtgatatttctgaggctgttatccagaagttcctctatctaggagatgaccgaaacattgaggaggtttatgtgggtggaaagcaggtcgttccattctccagctccgtgtaaggcccttggacatccatgacgctctcctgggaggacatgagtctgctatcttccttgtacccagggaccgatcagaaagtatattcaaaaaaaaaaaaaa

SEQ ID NO: 218 - DNA, 2307 bp, Rattus norvegicus
  Genbank Accession No. NM_031789
gccgccgcctcacctctgctgccagtagcctcgccgtcggggagccctagcgcagcgtccgccctcagcatgatggacttggaattgccaccgccaggactacagtcccagcaggacatggatttgattgacatcctttggaggcaagacatagatcttggggtaagtcgagaagtgtttgactttagtcagcgacagaaggattatgagctggaaaaacagaaaaaactcgaaaaggagagacaagagcaactccagaaggaacaggagaaggcctttttcgctcagttacaactggatgaagagaccggagaattcctcccaattcagccagcccagcacatccagacagacaccagtggatctgtcagctactcccaggttgcccacattcccaaacaagatgccttgtactttgaagactgtatgcagcttttggcagagacattcccatttgtagatgaccatgagtcgcttgccctggatattcccagccacgttgagagctcagtcttcaccacccctgatcaggctcagtcactcgatagctctctggagacggccatgactgatttaagcagcatacagcaggacatggagcaagtttggcaggagctattttccattcccgagttacagtgtcttaatacggaaaacaagcagcaggctgagactaccactgtccccagcccagaggccacactgacagagatggacagcaattaccatttttactcatcgatcccctcactggaaaaagaagtggacagctgtagtccacatttccttcatggttttgaggattcttttagcagcatcctctccacggatgatgccagccagctgaactccttagactcaaatcccaccttgaacacagatttcggtgatgaattttactctgctttcctagcagagcccagtggcggtggcagcatgccttcctctgctgccattagtcagtcgctctctgaacttctgggcgggcccattgagggctgtgatctgtccctgtgtaaagctttcaaccagaagcacactgaaggcacggtggagttcaatgactctgactccggcatttcactgaacacaagtcccagccgagcatccccagagcactctgtggagtcttccatttacggagacccaccgcctgggttcagtgactcggaaatggaagagctagacagtgcccctggaagtgtcaaacagaatggacctaaagcacagccaacacattcttctggggatacagtacagcctctgtcgccagctcaagggcacagtgctgctgtgcacgaatcccagtgtgaaaatacaacaaaaaaagaagtacctgtgagtcctggtcatcaaaaagtcccattcacaaaagacaaacattcaagccgattagaggctcatctcacaagagatgagcttagggcaaaagctctccatattccattccctgttgaaaaaatcattaatctccctgttgatgacttcaatgaaatgatgtccaaggagcaattcaacgaagctcagcttgcattaattcgagatatacgcaggagagggaagaataaagttgccgctcagaactgtaggaaaaggaagctggaaaacattgtagagctggagcaagacttgggccacttaaaagacgagagagaaaaactactcagagaaaagggagaaaacgacagaaacctccatcttctgaaaagaaaactcagcactttgtatctggaagtcttcagcatgttacgtgatgaggatgggaaaccttactctcccagtgagtactctctgcagcagaccagagatggcaacgtgttccttgttcccaagagcaagaagccagatacaaagaaaaactaggttcgggaggatggagccttttctgagctagtgtttgttttgtacggctaaaacttcctactgtgatgtgaaatgcagaaacactttataagtaactatgcagaattatagccaaagctagtgtagaaataatatgaaactttacaaagcattaaagtctcaatgttgaatcagtttcattttaactctcaagttaatttcttgggcaccatttgggctagtttctgtgtaagtgtaaatactacagaacttatttatactgttctcatttgttacagtcatagacttatatgacatctggctaaaagcaaactattgaaaactaaccaaaccactatacttttttatatactgtatgaacaagaaatgacatttttatattaaattgtttagctctgataaaaattaaaaggagctagcactaataaaggaatatcatgactt

SEQ ID NO: 219 - DNA, 3236 bp, Rattus norvegicus
  Genbank Accession No. NM_031814
gcccgcgccccccacgctggcccagagggctgcggccgcttcgccgctgaggatgtcccggaaggggccgcgagcggaggtgtgtgcggactgcagcgcccctgaccctggctgggcatctatcagcagaggtgtgctggtttgtgacgagtgctgcagtgtgcaccggagcctgggacgacacatctccattgtcaaacaccttcgccacagcgcctggcctcctacgctgctacagatggtgcacacgcttgccagcaacggggccaactctatctgggagcattccctgctggaccctgcacaagtgcaaagtggccggcgcaaagccaacccccaagacaaagtccaccccatcaagtcagagttcatcagggcaaagtaccagatgctggcgtttgtgcacaagcttccctgccgtgatgatgatggggtcaccgccaaagacctcagcaagcaactgcactcgagtgtgcgaacaggcaacctggagacctgtctgcgcctgctttccctgggtgcccaggccaacttcttccacccagaaaagggcactacacctctacacgtggctgccaaggcagggcagacactgcaggctgagctgctagtagtgtatggggctgacccaggctcccctgatgtcaatggccgcacacccattgactatgccaggcaggcggggcaccatgaactggcagaaaggctagttgagtgccagtatgagctcactgaccggttggccttctacctctgtggacggaagcctgatcacaagaatgggcattacatcataccacagatggctgacagatctcggcaaaagtgcatgtctcagagtttggatctgtctgaattggccaaagctgccaagaagaagctacaagcactcagcaaccggctctttgaggagctcgccatggatgtgtatgacgaagtggaccggagagaaaatgatgcagtgtggctagctacccagaatcatagcaccctggtgacagaacgcagtgctgtgcccttcctgccagtcaaccctgaatactcagccactcggaatcagggacgacagaaattggctcgttttaatgcccgagagtttgccaccttgatcatcgacatcctcagtgaggccaaacggaggcagcagggcaagagtctgagcagccccacagacaacctcgagctgtctgcacggaaccaaagtgacctggacgaccagcacgactacgatagtgtggcttctgacgaagacacagaccaggagcccttgcccagtgctggcgccacgcggaacaatcgtgccaggagcatggactcctcagatctgtcggatggggctgtgacgctgcaggagtacctggagctgaagaaggctctggctacctccgaggccaaagtgcagcagctcatgaaagtcaacagcagtctgagtgacgagcttcggaagctgcagagggagatccacaaactgcaggcagagaacctgcagctccggcagccaccaggaccagtgcctgtaccctcacttcccagtgaacgggcagaacacacactcatgggccctggtggaagtacccatcgcagggaccgccaggccttctctatgtatgagccaggctccgccctgaagccctttggaggtgcacctggggatgagctcgccacacggctccagcctttccacagcacagagctggaagatgatgccatctattcagtacatgtccctgctggcctttaccggatccggaagggggtgtctgcctcttctgtgaccttcactccctcctccccactgctgtcaagctcccaagaaggaagtcgccatgcgagcaagctttcacgccacggcagtggcgcagagagtgactatgagaacacacagagtggagagcctctgctgggacttgaagggaagcgattcctagagctgagcaaggaggatgagctgcacgctgagctggagagcttagatggagacccagaccccgggctccccagcacagaagatgtcatcctaaagacagagcaggtcaccaagaacattcaggagctattgcgggcagcccaggagttcaaacatgacagctttgtgccctgttcagaaaagatccatttggctgtgactgagatggcctctctcttcccaaagaggccagccctggagcctgtgcgcagttcactgcggctgctcaacgccagcgcctaccggctgcagagtgaatgccggaagacagtgcctccagaacctggcgcccctgtggacttccagctactgactcagcaggtgatccagtgcgcctatgacatcgccaaggctgccaagcagctggtcaccatcaccacccgagagaagaaacagtgaccactttccctgcccttacccacaccctgggacctcactggccatgggagctgggccactccagacactaacccacccccaacagagccactggcacaagtgcccttagtgccaccattctcctctggcatccaggtgccctggtgtccacacccccttaagccccaaggatgggaatgtgaggtgacaggaccatctgtcccccacattccacgcccctccctctgtacatagcatccctgccctgctgatacgcaggagcctcaaggagtccctcccagctcttcacctgccttccagggccccctcagcaaagggtgggacagggacactccaagtggggcagccccgcctactgcaccctatccccatgagccagttcagccctggggggtcgagcagaggcaccccctcctttgtgcattatctmtgggtgtytytgccccgtagccagcagcccccccgctgctctttcatgacaaatggcccctgccagagcacaggccccaacttgtgtgccagggtccccagcagcaaacactggaacgtctttctctcccctaccccttaattttaactttgtggtaactgagtgtccctgcgttcttacaactgagtgtgtgagcggcagtgccgtgccagagacctggtccacctggagctctgaggggcaggggaaccagagtagtgggaccagcattggaagtcagcttccctctacccaacctgggacggggactgtcagggtcaccagctgtggtccagttgctacccctacttgtatccctatcctataaacttaaaaggaaaaccacttccctccatctctccccatcccctgtgggaagtgtgctgaccaggcagaggacag

SEQ ID NO: 220 - DNA, 1947 bp, Rattus norvegicus
  Genbank Accession No. NM_031816
gggctagaggcgcgggttgaaaagtctcgttccaagtttggagagagggagagagaggagagcgtctcagacctcgctacccgcaagcggggaggaggcagaagagaagatcgcggcgtctggggagcacccagacagccagaccgagctcaggctttccgagctaggagtgcgtgacgtgcctgggagaggcaggagcgcctgcgatcgggctgctcttgactagcgagagaagtccgaggcggcaaaggggggcgaacgacccgacgcaagatggcgagtaaagagatgtttgaagatactgtggaggagcgtgtcatcaacgaagaatataaaatctggaagaagaatacaccgtttctgtatgacctggttatgacccatgctcttcagtggcccagtcttaccgttcagtggcttcctgaagtgactaaaccagaaggaaaggattatgcccttcattggctagtgctgggtacccatacatctgatgagcagaatcatctggtggttgctcgagttcatattcccaatgatgatgcacagtttgatgcttcccattgtgacagtgacaagggagaatttggtggctttggttctgtaacaggaaaaattgaatgtgaaattaaaattaatcatgaaggagaagtaaatcgcgctcgttatatgccacagaacccacacatcattgccacaaaaacaccatcttctgatgttttggtttttgactatacaaaacaccctgcaaaaccagatccaagtggagagtgtaatcctgatcttagattaagaggtcaccaaaaggaaggctatggtctctcctggaattctaatttgagtggacatctcctgagtgcatctgatgaccatactgtctgcctctgggatataaatgcaggaccaaaggaaggcaaaattgtggatgctaaagcaatctttactggccactcagctgttgtagaggatgtggcctggcatctgctgcatgagtccttgtttggatctgttgctgatgatcagaaacttatgatatgggacaccagatccaatactacttctaagcccagccatttggtggatgcacacactgcggaggtcaactgcctctcattcaatccctacagcgagtttattctggcaactggctctgcagataagactgtagctttatgggacctgcgtaatctgaaactaaaactccacacctttgaatcccataaggatgaaatttttcaggtccactggtctccacataatgaaactattctggcttcaagtggtactgatcgccgcctgaatgtgtgggatttaagtaaaattggagaagaacaatcagcagaagatgcagaggatgggcctccagagctcctgtttattcatggaggacacactgccaagatttctgacttcagttggaaccccaatgaaccttgggtcatttgctctgtgtctgaagataacatcatgcagatatggcaaatggctgaaaatatttacaatgatgaagagtcagatgtcacgacatcggaactggaggggcaaggatcttaaacccaaagtatgagttgtttctattgaatgtattgctacacgaatgcttgatttgtcaagcgccaaaaaggcattgtatagtaggaaatgtaagtgggatggcttctggcattctttaccctctgattctagcactttcaagtgagctgttgcgtactgtatcatattgtagctattaggggaacaaaaaggaatgttgcttaagaatggacatcattgttttaaacacacattgctgggtattgcctttgattcaactgtcattttctcaaacttttaagtgcttgctcaagttcccaaatatgcgaggataacttttacactttttccttccaacacttcttgattggctttgcagaaataaagtttttaaaaaaaaaaaaaaaaaaaaaaaaa

SEQ ID NO: 221 - DNA, 1536 bp, Rattus norvegicus
  Genbank Accession No. NM_031817
ttgaaactgaagcaatctcaacaggagaagaaatgggctgtttacgtccaatatatgtcctcttcttctgttttgtagttagagtatacggccaatatgaagcttaccagtgggatgaagattatgagcaagagccaagtgaggattatgagccagaattccagtttcaccaaaatatcgaatatggagctcccttttatcagaatattttaggttgtgctaaggaatgcttctgtccaactaactttccaacatcaatgtactgtgacaaccgcaaactcaagactatcccagatattccaatgcacattcagcaactcaaccttcagttcaatgatattgaggctgtgactgcagattcattcatcaatgcaactcatcttaaagaaattaaccttagccacaacaaaattaaatctcaaaagattgattatggtgtgtttgctaaactttcaaatctacagcaacttcatctagatcacaataacttagaagaatttccatttcctcttcctaaatctctggaaagactccttcttggttataatgaaatctctacacttccaacacatgccatggatgggctggtaaatgtcactatgcttgacctctgctataaccatctctctgactccacgttaaaaggaaagattctttccaaactggaaaagctcatgcagcttaacctgtgcaataacaggttagagtcaatgccccctgggttgccgttatcacttatgtatctatctttagaaaataattcaatttcatctataccagaggattactttcagaaacttccaaaacttcatgctctaagaatatcacacaacaaacttgaagacattccatatgacatctttaatctttccaatcttatagaactcaatgttggacataacaaactgaagcaagcattctacattccaaggaatttggaacatctatacctacaaaataatgaaatacaaagcatcaatgtgacaatgatgtgtccttctcttgatccattacaccatcaccatttaacataccttcgtgtggaccaaaataagctgaaggaaccaataagttcatatatcttcttctgcttccctcggatacacagtatttattatggtgagcagaggagcactaatggtgaaacaatacaactgaagacccaagttttcaggcgctatcaagatgaggaagaggaagaggaagacgacagtcaggaccacactcttgagggtcaagaagaaacagaagagcactttaattctcattactatgaaatgcaagcatggcaaaatactatataggtacatatttatgactccataaagccttaataattacaaatgtaagcgtatacctgctcataataatatatctagaagtatgtgctagtataaagacccgaattgcatttgagatgttagtgagaatggttttacttcataggcgtagtgcttactagaaacgatgcaaaccttaagaaatataaagtagaatggcaagtgggaataaacaaaactaagctcaaaaaaaaaa

SEQ ID NO: 222 - DNA, 2781 bp, Rattus norvegicus
  Genbank Accession No. NM_031821
ccacgcgtccgggagccggacgtcggactagagagtagggagagcgattggggctcgagggacagggctagaccggacgcgtgtccgcgcctcggaggtggcagtaggtagtgtcgggtagcgaggcaacgatggagctcctgcggactatcacctaccagccggccgccggcaccaagatgtgcgagcaggcgctgggcaaagcttgcggcggggactcaaagaagaagcgaccgcagcagccttctgaagacgggcagtcccaagcccaggtgaccccggcggccccacaccaccatcatcaccattctcactccggacccgagatctcgcggattatagtcgaccccacgacggggaagcgctactgccggggcaaagtgctgggcaagggtggatttgcaaagtgttacgaaatgacagatctgacaaacaacaaagtctacgctgcaaaaattatccctcacagcagagtagctaaacctcatcaaagggaaaagatcgacaaagaaattgagcttcacagaatcctgcaccataagcatgtagtgcagttttaccactactttgaagacaaagaaaacatttacatcctcttggagtactgcagtagaaggtccatggctcatatcttgaaagcaagaaaggtgttgacagagccagaagtccgatactacctcaggcagattgtgtcgggactcaagtatcttcacgaacaagaaatcttgcatagggatctcaagctagggaacttttttattaatgaggccatggagctgaaggttggagacttcggcttggctgccagactggaacctttggaacacagaaggagaacaatatgtggaaccccaaattatctctcccctgaagtcctcaacaaacaaggacatggctgtgaatcagacatctgggccttaggctgtgtaatgtatacaatgctgctaggaagacctccattcgaaacaacaaatctgaaagaaacgtacaggtgcataagagaagcaagatatacaatgccgtcttcattactggcccccgccaagcacttgatagccagcatgctgtccaaaaacccagaggaccgccccagtttggatgacatcattcggcatgacttctttctgcagggcttcactccagacagactctcttctagctgttgccacacagttccagacttccacttgtcaagcccagctaagaatttctttaagaaagctgctgccgctctttttggtggcaaaaaggacaaagcaagatataatgacacacacaataaagtgtctaaggaagatgaagacatctacaagcttcggcatgatttgaagaaaacatcgataacccagcaacccagcaaacacagaacagatgaggagctccagcctcctccaactacctttgccaaatctgggacatccgcagtggaaaacaaacagcagattggagatgcaatccggatgatagttagagggacgctgggcagctgcagcagcagcagtgaatgccttgaggatagcaccatgggaagtgttgcagacacagtggcaagagtccttcgagggtgtctagaaaacatgcctgaagctgactgtattcccaaagagcagttgagcacgtcctttcagtgggtcaccaaatgggtcgactactccaacaaatacggctttggataccagctctcagaccacactgttggagtccttttcaacaacggcgctcacatgagcctccttccagacaaaaagacagttcactattatgcggaacttggccaatgctctgttttcccagcaacagatgcccccgaacaatttattagtcaagtgacggtgctgaaatacttttcccactacatggaggagaacctcatggatggtggcgatctccctagtgttactgacattcgaagacctcggctctacctccttcagtggttaaagtctgataaagccttaatgatgctcttcaatgacggcacatttcaggtgaatttctaccacgatcatacaaagataattatctgtaaccaaaatgaagaataccttctcacatacatcaacgaagacaggatatctacaactttcagactgacgaccctgttgatgtctggctgttcgctagaattgaaacatcgaatggaatacgccctgaacatgctcttgcagagatgtaactgaaaaacctcttttagagcggacctcgtgggggctcttttccactgtgagatcaacagggaagccagtggagggataacggagcatgttagagaaatcggacaggtgctggtacgaatacgagtcgtctgtggcctgctggactgctggaaccagaccagcctaaggtggacagttgactttgggcaatcttaagtgtggagccaagtacagttttccttgagatacctgtctttacaaagtttatcggacaattttgcagacagacgctttgactctgaagttctctctgtggagagtgttttcagttggaagacttggaactgtgaataaacttcctgaaggggagggagaagggaggaagctccctcgctgttgaaaggctacaatcagagcagcttttgtttggctgcttaactgtgaactatggccatacatatttttttttttggttatttttgaatacacttgtggctggaaaagtgcattccttgttaataaactttttatttattacagccccaagagcagtatttattatcaagatgtcttttttttttatgttgaccattttgaactcttggcaataaagagtatgaaatag

SEQ ID NO: 223 - DNA, 8942 bp, Rattus norvegicus
  Genbank Accession No. NM_031825
atgcggcgaggagggctgctggaggtcgcgctggctttcgccctgctcctcgagtcctacacgagccatggggcggatgccaatctggaggctgggagcctaaaggagaccagagccaatcgcgccaagagacgaggcggcggaggacacgatgctctgaaaggacccaatgtctgtggatctcgttataacgcatactgttgtcccggatggaaaaccttacctggtggaaatcagtgtattgttcccatttgccggcattcctgtggggacggattctgctcaagaccaaacatgtgcacttgcccgtctggtcagatatcgccttcctgtggctccagatccatacaacactgtagcatccgctgtatgaatgggggcagctgcagcgatgaccactgtctgtgccagaaggggtacattggcactcactgcggacaacctgtctgtgaaagtggctgtctcaatggagggaggtgcgtggccccaaatcggtgtgcatgcacatacggctttacgggaccccagtgtgaaagagattacagaacaggcccgtgttttactgtggtaagcaaccagatgtgccagggacagctcagcgggattgtctgcaccaaaacactctgctgtgccaccgtgggccgagcctggggccacccctgcgagatgtgtcctgcccagcctcacccctgccgccgcggcttcattcccaacatccgcactggagcttgtcaagatgtggatgaatgtcaggctatcccagggctgtgtcaaggaggaaattgcattaataccgttggatcttttgagtgcaaatgccccgctggacacaaatttaatgaagtgtcccaaaaatgtgaagatatcgatgagtgcagcaccatccctggtgtgtgcgatggcggggagtgtaccaacacggtcagcagttatttctgcaaatgtccccctggcttttacacctctcccgatggcaccagatgcgtagatgttcgccctggttactgctacacagctctgacaaatgggcgctgctctaaccagctgccacagtccataaccaaaatgcagtgctgttgtgatgttggccggtgctggtctccaggggttactgtcgctcctgagatgtgtcccatcaggtcaactgaggacttcaacaagctgtgctccgtccctctggtaatccccgggagaccagactatcctcccccacccctcggcccccttcctccggttcagcctgttcctgggtttccttccgggcctgtgataccggtcccccggccaccgccagaatacccgtatccatctccatcacgggaaccaccaaaggtgctgcctttcaacgttactgactactgtcaattggtccgctatctctgtcaaaatgggcgctgcattccaactcccggtagctaccgctgtgagtgcaacaagggcttccagctggatatccgtggcgagtgcatcgacgttgatgagtgtgagaaaaacccatgcaccggtggagaatgtatcaacaaccagggctcatatacctgtcactgccgagctggctaccagagcacactcaccaggactgagtgcagagacatagatgagtgtctgcagaacggccggatctgtaacaacgggcgctgcatcaacacagatggcagcttccactgcgtgtgcaatgcgggctttcacgtcacgagggacggaaagaactgtgaagacatggatgagtgcagcatcaggaacatgtgcctgaatgggatgtgcatcaacgaagatgggagtttcaagtgtatttgcaaacctgggttccaactggcgtcagatggccgctactgcaaagatatcaatgagtgtgagactcctggaatctgcatgaacggacgatgcgtgaacactgatggctcctacagatgcgaatgctttcccggattggctgtgggcctagatggacgcgtgtgtgttgacacacacatgcggagcacatgctacggaggctacaggagaggccagtgtgtgaagccgttgtttggtgctgttaccaaatcggaatgctgttgtgccagcaccgagtatgcctttggggaagcctgccagccgtgtcctgcacagaattcagcggaatatcaggcactttgcagcagtggacccggaatgacatcagcaggctctgatataaatgaatgtgcattagatcctgacatttgcccaaatggaatttgtgaaaatctccgtgggacctacaaatgtatatgcaactcgggatacgaagtagacataactgggaaaaactgtgtcgatattaatgagtgtgtgctgaacagtctactttgtgacaatggacaatgtcgaaacacacctggaagttttgtctgtacctgccccaagggatttgtgtacaaacctgacttaaagacctgtgaagacattgatgaatgtgaatcgagtccttgcattaatggagtctgcaagaacagccctgggtctttcatttgcgaatgctctcctgaaagtactctggatccaacaaaaaccatctgcatagaaaccatcaagggcacttgctggcagactgtcattgacgggcgatgtgagatcaatatcaatggagccaccttgaagtccgagtgctgctcctcccttggcgctgcctgggggagcccgtgcactatatgtcaagttgatcccatatgtggtaaagggtactcgagaattaaaggcacgcaatgtgaagatatcaatgagtgtgaagtattcccgggagtatgcaagaatggcctgtgtgttaactccaggggttccttcaagtgcgagtgtcccagtggaatgactttggatgctacaggaagaatctgtcttgatatccgcctggagacctgcttcctcaagtacgacgacgaggagtgcacgctgcccattgctggccgccaccgaatggatgcctgctgcagctccgttggggcagcctggggaacagaagagtgtgaggagtgtccattgagaaacagccgggagtatgaggaactctgtccccgaggacccgggtttgccacgaaagacataacaaatgggaaacctttcttcaaagacattaatgagtgcaagatgatacccagcctctgtacccacggcaagtgtaggaacaccattggcagcttcaagtgcaggtgtgacagtggctttgctttggactctgaagagaggaactgcacagacattgacgagtgccgcatatctcctgacctctgtggccgaggccagtgtgtgaacaccccgggggatttcgaatgcaagtgtgacgaaggctatgaaagtggcttcatgatgatgaagaactgtatggatattgatgaatgccagagagatcctctcctctgtcgaggaggcatctgccacaacacagagggaagttatcgctgtgaatgtccttctggccaccaactgtctccaaacatctctgcgtgcattgacatcaacgagtgtgaactgagcgcgaacctctgtccccacgggcgttgtgtgaacctcattgggaagtacgagtgtgcctgcaacccgggctatcaccccactcatgataggcttttctgtgtcgacattgatgaatgcagcataatgaatggtggttgtgagaccttctgcacaaactctgacgggagctatgaatgtagctgtcagccaggcttcgcgctgatgccagaccagcgatcgtgcacagacattgatgagtgtgaagataaccccaatatctgtgatggtggccagtgcacaaacattcctggagagtacaggtgcttgtgctatgatgggttcatggcgtctgaagacatgaagacttgtgttgatgtcaatgaatgtgacctgaatcccaacatctgcctcagtgggacctgcgagaacactaaaggctccttcatctgccactgtgatatgggctactcagggaaaaaaggaaaaactggctgcacagatatcaatgaatgtgagattggagcacacaactgtggcagacatgctgtgtgcacaaatacagcagggagcttcaagtgcagctgcagtcctggctggattggagatggcattaagtgcacagatctggatgaatgctctaatggaacccacatgtgcagccaacacgcagactgcaagaacaccatggggtcatatcgctgtctctgtaaggatggctacacaggggatggcttcacctgcacagaccttgacgagtgctctgagaacctgaacctctctggcaatggccagtgcctcaatgcccctgcggggtaccgctgtgaatgcgacatgggcttcgtgcccagtgctgatgggaaggcctgtgaagatatcaacgagtgctcccttccaaacatctgtgtctttggaacttgccacaatctcccgggcctcttccgctgcgagtgtgagattggctacgagctggaccgaagtggtggaaactgcacagatgttaatgagtgtctggatcctaccacctgcatcagtgggaactgtgtcaacactccaggcagttacacatgcgactgtccacctgattttgagctgaatccaactcgagtgggctgtgtcgatactcgctctggaaactgctatctggatatccgaccccggggagacaatggagatacggcctgcagaaatgaaattggagttggtgtttctaaggcttcctgctgttgctctctgggtaaagcttggggaaccccatgtgagctgtgtcctcctgtgaacacatccgagtataaaattctctgccccggaggagaaggttttcgtccaaatcccatcaccgttatattggaagacatcgatgagtgccaggagctcccagggctgtgccaaggggggaagtgcatcaacacctttggcagcttccagtgtcgctgtccaacgggttactacctgaatgaagacacacgggtgtgtgatgatgtgaacgaatgtgagactcccggaatctgtggtccggggacatgttacaacaccgttggcaactatacctgcatttgtcctccagactacatgcaagtgaatggggggaataattgcatggacatgagaagaagcctgtgctacagaaactatcatgctgacaaccagacctgcgatggagaactgctcttcaacatgaccaagaagatgtgttgctgctcctacaacatcggccgtgcctggaataagccctgtgaacagtgtcccatcccaagcacagatgaatttgctaccctctgtggaagccagaggccaggcttcgtgattgacatttacacaggtttacctgtggatattgatgaatgccgggagatcccaggggtttgtgaaaatggagtgtgcatcaacatggttggcagcttccggtgtgagtgccctgtgggattcttctacaacgacaagttgctggtttgtgaagatatcgatgagtgtcagaatggccccgtgtgccagcgcaatgcggaatgcatcaacaccgcaggcagctaccgctgtgactgcaaacccggctaccgcctcacctccacaggtcaatgcaacgatcgaaacgagtgccaagaaatcccgaacatatgcagtcatggccaggtcatcgacactgtgggaagcttctactgcctctgtcacacaggcttcaaaacaaacatagatcagaccatgtgcttagacataaatgagtgtgagagagacgcctgtgggaatgggacttgcagaaacacaattggttccttcaactgccgctgcaaccatggcttcatactctctcacaacaatgactgcatagacgttgatgaatgtgcaactggaaacgggaacctttgtagaaatggccagtgcgtcaacacggtggggtcctttcagtgcaggtgcaatgaaggctacgaggtggctccagacggcaggacctgtgtggatatcaatgaatgtgttctggatcctgggaaatgtgcacctggaacctgtcagaacttggacggctcctacagatgcatttgcccacctgggtacagtctacagaatgacaaatgtgaagatattgatgagtgtgtcgaagagccagaaatctgtgctttggggacctgcagcaacactgaaggcagcttcaaatgtctgtgtccagaagggttctccctgtcctctactggaagaaggtgccaagacttgagaatgagctactgctacgcgaagtttgaaggtgggaagtgttcgtcgcccaaatccaggaatcattccaagcaggaatgctgctgcgctttgaagggagaaggctggggagacccttgtgagttgtgtcccactgagccagatgaggctttccgccagatatgcccctttggaagtgggatcatcgtgggccctgatgactcggcagttgatatggatgaatgcaaagaacctgatgtctgtaaacatgggcagtgcatcaacacagacggctcctatcgctgcgagtgtccctttggttatattctagaagggaatgagtgtgtggataccgatgaatgctccgtgggcaatccttgtggagatgggacctgcaagaatgtgattggaggttttgaatgtacctgtgaggagggattcgagcctggtccaatgatgacatgtgaagatataaatgaatgtgcccagaatcccctactctgcgccttccgctgtgtaaatacctatgggtcctatgaatgcaagtgccctgttggatatgttctgcgagaagacaggaggatgtgtaaagatgaggatgagtgtgcagaggggaagcacgactgtactgaaaagcaaatggagtgcaagaacctcatcggtacctacatgtgcatctgcggcccagggtaccagcgaagacctgatggagagggctgcatagatgagaatgaatgtcagaccaagcctgggatctgtgagaacgggcgttgcctcaacaccctggggagctacacctgtgagtgtaatgatggcttcacagccagccccactcaggatgagtgcttggacaaccgggaagggtactgcttttctgaggtactgcagaacatgtgccagattggatcaagcaacagaaaccccgtcaccaagtccgagtgctgctgtgatggagggagaggctggggaccccactgtgagatctgccccttcgagggcacagtggcttacaagaaactgtgtccccacggccgaggattcatgaccaacggagcagatattgatgagtgcaaggtaatccacgatgattgccgaaacggggagtgtgtcaatgacagaggatcatatcactgcatctgtaaaactggctacactccggacataacagggaccgcctgtgtagatctaaatgagtgcaaccaggctcccaaaccctgcaatttcatatgcaaaaacacagaagggagttaccagtgttcctgccccaagggctatattctgcaagaggatggaaggagctgcaaagatcttgacgagtgtgcaaccaagcagcataactgtcagttcctgtgtgttaacaccatcggcggcttcacatgcaaatgccctcctgggttcacccagcaccacactgcctgcattgataacaatgaatgcacttctgagatcaacctgtgtgggtccaagggcgtttgccagaatacaccaggaagcttcacctgtgaatgccagcggggattctccctcgatcagagtggtgccagctgtgaagatgtggacgagtgtgagggtaaccaccgctgccaacatggctgccagaacatcattggaggctataggtgcagctgcccccagggctacctccagcactaccagtggaaccagtgtgtagacgaaaacgagtgcctgagtgcacatgtctgtgggggagcctcctgccacaacaccctggggagttacaagtgcatgtgtcctgctggcttccagtacgaacagttcagtggaggctgccaagatatcaacgagtgtggctcatcccaggccccctgcagttatggttgctctaatactgagggtggctacctatgtggctgtcctccaggatacctccggataggccaagggcattgtgtttctggaatgggcatgggccgaggtggcccagagccacctgccagtggcgagatggatgacaactcactgtccccagaggcctgctatgagtgtaagatcaatggctacccaaaacgaggcaggaaacggagaagcacgaatgaaacagatgcctctgacatccaggatgggtctgaaatggaagccaacgtgagcctcgcgagctgggatgtggagaagccagctagctttgctttcaatatttcccatatcaataacaaagtccgaatcctagagctcctgccggcccttacaactctgatgaaccacaacaaatacttgatcgagtctggaaatgaatatggcttctttaaaatcaaccagaaagaaggggtcagctacctccacttcacgaagaagaagccagtggctggaacctactccttacaaatcagcagtactccactttataaaaagaaagaacttaaccagttagaagacagatatgacaaagactacctcagcggtgaactgggcgataacctgaagatgaaaattcagatcttgctgcattaacttaccatccagagaccaaataattaaaaaagaaaaagcaactttaggtaggtaggattatattttccccaagccagaacctgcatggtacaatcattcaccgagtcgatctgtgtaaatgagcaccattcttggatggcaacaccaaggtacagcgacgatcctagttcaaacaaaccactctctcaagcttctcgtgagtagctcagctaccctgtcatgggtattgattcctgagaactgggacatgagtatcggcggaagtgggccgtgcgtgccgaccgccatctttccagccgccccacagaagcatgtttccatct

SEQ ID NO: 224 - DNA, 948 bp, Rattus norvegicus
  Genbank Accession No. NM_031832
aacagctagcggagcggcaggaggagcactaaccaggaaaatggcagacggcttctcacttaatgatgccttagctggctctggaaacccaaaccctcgaggatggcctggtgcatgggggaaccagcctggggcaggaggctacccaggggcctcctatcctggggcctacccaggacaggctcctccagggggttatcctggacaggctcctcctagtgcctatccgggcccaactggccctagtgcttatcctggcccaactgcccctggagcttatcctggcccaactgcccccggagccttcccagggcaacctgggggacctggagcctaccccagtgctcctggggcctaccccagtgctcctggggcctatcctgctactggcccctttggtgccccgactggaccactgacagtgccctacgatatgcccttgcctggaggagtcatgcctcgcatgctgatcacaatcataggcacagtgaagcccaacgcaaacagtatcactctgaatttcaagaaagggaacgacatcgccttccactttaacccccgcttcaatgagaacaacagaagagtcatcgtgtgcaacacgaagcaggacaataactggggaagggaagaaagacagtcagctttcccctttgagagcggcaaaccattcaaaatacaggtcctggttgaagccgaccacttcaaggttgcggtcaatgatgttcatctgttgcagtataaccatcggatgaagaacctcagggaaatcagccaactggggatcattggtgacataaccctcaccagcgcttcccacgccatgatctaagccagaaggggtgggccggcaccagaactgccctgtgtgttatgagcgggaaactttgcatttctctctccttatacttcttgtaagacatccatttaataaagtctcgtgctgagaga

SEQ ID NO: 225 - DNA, 1227 bp, Rattus norvegicus
  Genbank Accession No. NM_031834
ggaattcgcaacgcctacacaaagatccctatcactgagcacccggaggcaaggctcagaaccccaggatcagcaacatggagttctcccgtccaccgctagtgcatgtgaagggtatcccactcatcaaatactttgcagagacaattgggccattgcagaacttcacagcctggcctgatgacttgctgatcagcacatacccaaagtctggtactacctggatgagtgagatcctggatatgatctatcagggtggcaagctagagaagtgtggccgcgcccccatctatgcccgggtacccttccttgagttcaaatgtccaggggttccctcaggtcttgaaactttggaagagacaccagccccacggctccttaagacacatctgcccctgtccttgctccctcagagtctgctggatcagaaggtcaaggtgatctacattgcccgaaatgcaaaggatgtggttgtctcctattataacttctacaacatggccaagctgcaccctgatccaggcacctgggacagcttcttggagaacttcatggatggggaagtgtcctatgggtcgtggtaccagcacgtgaaggagtggtgggagctgagacacactcaccctgttctctatctcttctatgaagacataaaggagaaccccaaaagggagatcaagaagattctagagtttttggggcgctctctacccgaggagactgtggattccattgttcaccacacatctttcaagaaaatgaaagagaactgcatgactaactacacaaccatccccactgagattatggaccacaatgtttctcccttcatgaggaaaggtactactggggactggaaaaataccttcactgtagcccagaatgagcgctttgatgcccactatgctaagacaatgacagattgtgacttcaagtttcgttgtgaactatgagtggattatggctatactgggaaccaaggcaaactgacacagcccatcatgatctcaagtaaaatgtgatgtgttcaatctacttgttgtatgcctagaggaaatctgagctaagagaataggattggggatgtggctgaggcagagggttttatcaacgcatgtcaggaaagcaatcagtcccaacacctaaaaagaacctaaagtacaaacatgcaaaaaatagtaagataaactatattttacctgaaagaataaatgccactgggaaatg

SEQ ID NO: 226 - DNA, 1688 bp, Rattus norvegicus
  Genbank Accession No. NM_031851
cagaaggagtcatggctgccaaagtgtttgagtccatcggaaagttcggcctggccttagcagttgcaggaggcgtggtgaactctgctctatataacgtggatgccggacacagagctgtcatcttcgaccgattccgtggcgtgcaggacatcgtggtaggggaagggactcacttcctcatcccctgggtacagaagccaatcatctttgactgccgctctcgaccacgtaatgtgccggtcatcaccggcagcaaagacttgcagaatgtcaacatcacactacgtatcctcttccggccggtggccagccagcttcctcgtatctacaccagcattggcgaggactatgatgagcgggtgctgccatctatcaccacagagatcctcaagtcggtggtggctcgattcgatgctggagaattgattacccagcgagagctggtctccaggcaggtgagtgatgacctcacagagcgagcagcaacattcgggctcatcctggatgacgtgtccctgacacatctgaccttcgggaaggagttcacagaggcggtggaagccaaacaggtggctcagcaggaagcagagagagccagatttgtggtggaaaaggctgagcagcagaagaaggcggccatcatctctgctgagggtgactccaaagcggctgagctgatcgccaactcactggccaccgccggggatggcctgatcgagctgcgaaagctggaagctgctgaggacattgcttatcagctctcccgctctcggaacatcacctacctgccagcagggcagtccgtgctcctccagctcccccagtaaggccagccagccagggcctccatcgctctgaatgacgccttccttctgccccaccccagaaatcactgtgaaatttaatgattggcttaacatgaaggaaataaaggtaaaatcacttcatatctctaattatcaaatgaagcttttattgttacactttttgcccactttcataacaaaattgccaagtgcctatgcagactggccttccaccctgggtgctggcagtcggcggaagaaaggcagggcagtgtgtgtggtggacggggagccagctggcagcctgagtagaccttgagcctccattctgccatatattgaagatttacagacagtggtgcacacacgtgaaccaaaagcaagccctcaatttttccagccatacgaacccggacagatgcagctgaggagggcctgaggaagtggtctgtcttaactgtaaggccattccctcttaaccgtgaccagcggaagcaggtgtgtgcgtgcgactagggcatggagtgaagaatctgcccatcacggtgggtgggcctaattttgctgcccccaccagagacctaaactttggatagacttggatagaataagaggcctggactgagatgtgagtcctgtggaagacttcctgtccaccccccacattggtcctctcaaataccaatgggattccagcttgaaggattgcatctgccggggctgagcacacctgccaaggacacgtgcgcctgccttcccgctccctctcttcgagattgcccttccttcccaagggctgtgggccagagctccgaaggaagcaatcaaggaaagaaaacacaatgtaagctgctgtcaataaatgacacccagaccctc

SEQ ID NO: 227 - DNA, 2718 bp, Rattus norvegicus
  Genbank Accession No. NM_031967
gaccgagtgactcaggcttttgtttgccccttctggttcagcaaattcccttctcggcaagatgccggagtgctgggatggggaacatgacattgagacgccttatggcctcctgcatgtggtgatccggggctctcccaaagggaaccgcccagccatccttacctaccacgatgtgggtctcaatcacaagctgtgcttcaacaccctgttcaacttggaggacatgcaggagatcaccaaacacttcgtggtgtgccatgtggacgcccctgggcagcaggtgggagcgtcacagttccctcagggataccagttcccctccatggagcagctggcgaccatgctcccgaatgtggtacagcactttggattcaagtacgtgattggcatcggagtgggggccggagcgtatgtgctcgccaagtttgcactcatcttccctgatttggtggaggggctggtgttgatgaacattgaccccaatggcaaaggctggattgattgggctgccacgaagctctccggcttgaccagcactttgccagatactgtactctcccatctcttcagccaggaggagctggtgaacaacacggagctggtgcagagctaccggcagcagatctcgagcgtggtgaaccaggccaaccttcagctcttctggaacatgtacaatagccgcagagatcttgacattaaccggcctgggacagtgcccaatgccaagacactccgctgcccagtgatgctggtggtcggtgacaatgcacctgctgaggacggggtggttgagtgtaactccaaactggacccaaccactacaaccttcctgaagatggcagactctggtggtcttcctcaggtgacccagccagggaagctgactgaggccttcaaatacttcctgcagggcatgggctacattgcacacttgaaggaccgaaggctcagtggaggagcagtgccctcagccagcatgacccgccttgcgcgctctcgtaccgcgtccctcaccagcgccagttctgtggatggtagccgccctcagccctgcacccactcagacagcagtgaggggatgggccaggtcaaccacaccatggaggtgtcctgctgaagtcctcgtcctgcccaagacacccgcttacctgcccccaggtcccactgccatcttcgcaccggctcatcttccctctggtttatttttgtgagagtgaaggggaggaaatggggttacttctcttttacttaaaacgaagggatccaccttaggacggcgcagaacaacagtcttagaggatgtgaagggctcaccttatacactcgcatctcaccggccaccggttgatacggcccccttcgtctgcccgtctggggtgtggccaggatgtaggacatagtacgaaagaaagcacagcccaccccctggagctggcagatagggagtttgaagatggcaggtgctgagccaaggctctgttgtgagtgggagtcagaccagtggggagccgtcccttttctgtaacccttgtaccaagcacacctaacagtagaggtgacagtcatgaggacagtagccacaagagagcgctctgagcagtcagccattttcctggtgctctctgggcaggacatgatagaaggctagccaggctgaagacagaatatggagaaccctgacatgggggcaggaaccccatactctgccaccacagggccatgtcccaccctgaggcaaaggtcacctggtctctcttgtccccgttggtagaggtgaaatgttgatggctttgtatgctgtgtacagcccctgagaacttcatggttgcccctttgggagctggcaggtactgtaggtccctcctatcccaggtttcaaacagcgagtgtttgtcacagtgccctggtcgacctgggccggcgtgtcacagacattattacttgagaagtgagcattaggaagatacaagacagaaagatacaatgacctctgcttgctgaaggggctggaaatggcctgctccttgtgtgggagatgggttattctccagatgaacaaaggctccgtacctcctacagcccgcaactatgtctgccacctgaccatgtagactctcacagcccagagctattgtgtcagccatccccagagaagagagagcacttaagtgtgaatatggggtgggcgtgatgtatgtggtgttgtgtgggtgttctgaggcaggaggacacctacatccgtgtgtctgtggcatatgccaccccttctttctgtaactgtaagccatttccagactgctctgaagtccagtggagtgtatcctatccctggttctgttcactcacgtgcttccgtgaataccgagtgtgactgtttaaagctggcagaattaatcccttactgtagatagcacttcaagtattggacatctttttgctgtgttcttaagatatctataaatacctatacattatatatatatgtatgtatatcgggtccttctgtatgtggtttcccattgatggttgtcttctctttggtcaggatgaacttttaatggagttcattacttccctctctgtacaaagttaagagcctaattttgtgtattctggtggctgataagagactttgagattacaaaatgcaaaacaaaaatccttattgatatagaaagatatctgtgcagaaaaactaataaagaaattaagcgt

SEQ ID NO: 228 - DNA, 787 bp, Rattus norvegicus
  Genbank Accession No. NM_031970
gcacttctcggatcctcagcccagtgcttctagatcctcagccctgaccagctcagccaagaccatgaccgagcgccgcgtgcccttctcgctactgcggagccccagctgggagccgttccgggactggtaccctgcccacagccgcctcttcgatcaagctttcggggtgcctcggtttcccgatgagtggtctcagtggttcagctccgctggttggcccggctatgtgcgccctctgcccgccgcgaccgccgagggccccgcagcagtgaccctggcccggccgttcagccgggcgctcaaccggcaactcagcagcggtgtgtcagagatccgacagacggccgatcgctggcgcgtgtccctggacgtcaaccacttcgctcctgaggagctcacagtgaagaccaaggaaggcgtggtggagatcactggcaagcacgaagaaaggcaggatgaacatggctacatctctcggtgcttcacccggaaatacacgctccctccaggtgtggaccccaccttggtgtcctcttccctgtcccctgagggcacactcacggtggaggctccgctgcccaaagcagtcacacaatcagcggagatcaccattccggtcactttcgaggcccgtgcccaaattggaggcccagagtcggaacagtctggagccaagtagaagccttcagcttgctacccatccccagtagccgtcaccagccctccctctctgtcaatctgaatgctcttttgatacatgtactttctgttttactcaaataaa

SEQ ID NO: 229 - DNA, 2280 bp, Rattus norvegicus
  Genbank Accession No. NM_031984
tgtaaatacagggctgaaagtgggagtggcgctccctcttcctgttatccccttggctcagcctcactgcctgatagaaatgtttctaatatggcacctggtcacagtccattgtagctgaactcccaggtcctgcactgtacaaccctcaccttcccagttcccttaccacctaataaagggcctgcctccggacagcgcccggcccgccgcgcccagctcagcctgctcagccctctggtcccgaggttccgctcagcgctctctcaaactagccgctgcaccatggcagaatcccacctgcagtcatctctgatcacagcctcacagttttttgagatctggcttcatttcgacgctgatggaagtggttacctggaaggaaaggagctgcagaacttgatccaggagcttctgcaggcacgaaagaaggctggattggagctatcacctgagatgaaaacctttgtggatcaatatgggcagagagatgatgggaaaataggaattgtagagttggcccatgtcttacccaccgaagagaatttcctgctgctctttcgatgccagcaactgaagtcctgcgaggaattcatgaagacttggagaaagtatgacactgaccacagtggcttcatagaaacggaggaacttaagaactttcttaaggacctgctagagaaagcaaacaagaccgtggatgatacgaaacttgctgagtacacagacctcatgctgaagctgttcgactcaaataatgatgggaagctggagctgacagagatggccaggttactaccagtgcaggaaaatttccttcttaaattccagggaatcaaaatgtgtgggaaagagttcaataaggcttttgagttatatgatcaggatggcaacggatacatagatgaaaatgagctggatgccttactgaaagacctgtgtgagaaaaacaaacaggaattggatattaacaatatttctacatacaagaagaacataatggccttgtcggatggagggaagctgtaccgaacagatcttgcccttattctctctgctggggacaactagagttggtggccacaaccacttgctagtgatacattgtatctaaaaccataactgtgcgctataaaggagtaggctgtattttcttttatatctgtaaattctactgcatatagagaattatccaggatgtgtggcacattcttttctgcttgtttctatactgtttgtaatgtacagtttttgtaagcatataattgaaaagaagaaagtctatgcttaggccagtcagtataatccattttcaaagatgaatctaacatgattctgctttcataaatacagatgaacacttggatttccctaaaactctaccatctcaacaattctagtgtcagatgtgtaaatgcacagctgtcagtgagtaaaagaataattcatgacaagccaagtgttttttaatttaggcaatcatagaactgtcccacaaagcacttctgtgcgttttccatctagtggaagggatgtgcttctgcttgtgaagcaccaaatgtcaatagttaactatggctttatcataaaacgatctccctagagatttaatttactgatcagtggcatgtctactgcttgaatagataccacactgttggttcaagctggcttggtggcaagggaaggtagccagatgacacataaatctgtctgatactatgcctatatttccaagaagtctattgcagagagtatgaccttagcccattttctaaattattttcatgtgttccagatgacaattattctagtaaactgctgttttgtgtcatattctgtgtgtactctctgattaaattcaatgtacctctgaggcctgtcgcagttgggctccggctcctttgcggagcaccatgtcgcagagggggaggagaccctgcagggcgcctgggtagaactgcacttcagcaatgggaatgggagcagcgttccagcttccgtctctatttataatggtgacatggaaaaaatactgctggatgcgcagatgaatctggacgaagcatctccaagagctctcactgtgacagcccacctcgctcccagacaccacaagataccaacaagagctgaaatagcaccacacgtttggtgagaaaaaacagcatgtgtgtctgaggaagattatattgagagaagaagagaagttgaaagtatcctgaagaaaactcagattggatatgggattggtcaagtcggccagaaaatgttcccccc

SEQ ID NO: 230 - DNA, 2287 bp, Rattus norvegicus
  Genbank Accession No. NM_031985
gtctgcggcgggtccgggcccatgaggcgacgacggaggcgggacggcttttacccagcgcctgacttccgacacagggaagctgaggacatggcaggagtgtttgacatagacctggaccagccagaggatgcaggctctgaggatgagctggaggaggggggtcagttaaatgaaagcatggaccatgggggagttggaccatatgaacttggcatggaacattgtgagaaatttgaaatctcagaaactagtgtgaacagagggccagaaaaaatcagaccagaatgttttgagctacttcgggtacttggtaaagggggctatggaaaggtttttcaagtacgaaaagtaacaggagcaaatactgggaagatatttgccatgaaggtgcttaaaaaggcaatgatagtaagaaatgctaaagatacagctcatacaaaagcagagcggaatattctggaggaagtaaagcatcccttcattgtggatttaatttatgcctttcagaccggtggaaaactctacctcatccttgagtatctcagtggaggagaactatttatgcagttagaaagagaggggatattcatggaagatacagcttgcttttacttggctgaaatctccatggctttggggcatttacatcaaaaggggattatctacagagacctgaagccggagaacatcatgcttaatcaccaaggtcacgtgaagctgacagactttggactatgcaaagaatctattcatgatggaacagtcacgcacacattttgtggaacaatagaatacatggcccctgaaatcttgatgagaagcggccacaaccgtgctgtggattggtggagtctgggagcattaatgtatgacatgctgactggagcacctccattcactggggagaatagaaagaagacaattgacaaaatcctcaaatgtaaacttaatttgcctccctacctcacacaagaagctcgagatctgcttaaaaagctgctgaagagaaatgctgcttctcgtcttggagctggccctggggatgctggagaagtccaagcgcatccattttttagacacattaactgggaagagcttttggctcggaaggtggagcgcccctttaagcctctgttgcaatctgaagaggatgtgagtcagtttgattcaaagtttactcgtcagacacctgttgacagccccgatgactcaactctcagtgaaagtgccaaccaggtctttctgggttttacatatgtggctccatctgtacttgaaagtgtgaaagaaaagttttcttttgaaccaaaaatccgatcgcctcgaagatttattggtagcccacgaacgcctgtcagcccagtcaaattctctcctggggatttctggggacgaggtgcttcagccagcacagcaaatcctcagacacctgtggaatacccaatggaaacaagtggaatagagcagatggatgtgacaacgagcggggaagcttcagcgccacttccaatccgacagcccaactctgggccatacaaaaaacaagcttttcctatgatctccaaacggccagagcacctgcgtatgaatctatgatgaaacaatgcttttattaatgcaaatgcaaaaaggaaacaaatcctggaagggcatgtgtgaggatcctgcaagataaaaatgagaaaatggcagtctcaaagagtcagtgtcattacctggaatgctttcgatggaggaaaaaataaacatggatttttaaaaaaatcaatcaatggtgcaaaaaataaacccacaaaaaactcaaacaaaatagtattgtggaacccacagacacatcaactgactggttcctaccctagcaacatctcagcgttcgtaaggattctcatgctgatggccgtaaactgacagtattaagggtaggatgttgcttctgaatcactggtaaagtctgatgatgtcacataagggttatcctaataggcaaagtacaagattgcctgtaatacttgcaactaaggacaaattagcatgcaagctttgtcaaactttttccagcaacacagaatcaaagacaaaagaaacttatcgattgatgttttacgtgcaaacaacctgaatcttttttttatataaatatatatttttcaaatagatttttgattcagctcattatgaaaaacatcccaaactttaaaatgcgaagttattggttggtgtgaagaaagccagcttctgttcttctcttgatgaaataaaatgcaaatggatcattgttaaaaaa

SEQ ID NO: 231 - DNA, 2077 bp, Rattus norvegicus
  Genbank Accession No. NM_031986
gacccacgcgtccgggagccggagcgagcggcaggaacaacgcggtgttcggggcagaaaacacctgcaaaaatgtctctctatccatctcttgaagatttgaaggtagacaaagtaattcaggctcaaactgcctcttctgctaatcctgccagccaggccttttttttaaatgtggtcgattctgctgccttccctccaggtggaaatctctatcctaaactgtatccagaactctctcaatacatgggactgtctttaagtgaagctgaaatatgtgaaaacatgcctgtggtctctggagcgccaacccaagggcagttggtagcaaggccatccagtgtgaactacatggtagcacctgtgacaggtaacgatgcggggattaggagagcagagattaagcaagggattcgggaagtcattttgtgtaaggatcaagatggaaaaattgggctcagactgaagtcagtagataatggtatatttgttcaactagtccaggctaattccccagcctccttggttgggctgcgatttggggaccaggtgctccagatcaatggtgaaaactgtgccggctggagctccgataaggcacacaaggtgctcaagcaggcctttggagagaagattaccatgaccattcgtgatagaccctttgaacggacagttaccatgcataaggacagcagtggacatgttggctttatctttaaaagtggaaaaatcacatccatagtgaaagacagttctgctgccagaaacggccttctcactgatcaccacatctgtgagatcaacggacagaacgtcattggcttgaaggatgctcagattgcagatatactgtcaacagctgggactgtggtcaccatcacaatcatgcctgcctttatcttcgaacatattattaaacggatggctcccagcattatgaaaagcctgatggatcacaccattcctgaagtttaaaccttgtacagtgcatcaccgccgaacgcttccagtcttcctcttcggcaacttctctatttcaccgcacatgaagctttcccggatccagggagactgtgctgcatggagacctgtctatcttccaccatggctgggaacctcactctatctgagagcgtcttcagattttaagataggtgtagccttatcctggttttacagatgtgaactctcaaaagattccctgactttctagacttggttctttactgggaacctgatgtttttctataagccattgtgattaggatgactggtgtaggcttagctgtgtccgagaactggtctgctttctccgagaagtgcacagtgctaggcacgtgcttcagttctgtggcatatgtggagtgtagtacatcagcatagtacctgtaggatgagtgcctttgatcgcaactttttaagtgtgtgtgtgagtgtgtaaaattccagttaatcaacacttcattcacaaaagcattatacagttctgtgtaggtggcaagagactaatgattgtcactaaattctaacaccttcacctaatgtgcttcagttgtcgcctaacacagaagcatttagataaagcaaatagaaattattgctgccttctgaaacctgagaggtagctctctatcaagctgttctatgctagccctgagcagcttactggtgtcgcagagctgcctagctgtaccaagattttctagtcactgcataaaggaaacgcctaagagttgccgtattgctttctgagatacaaattgctatatatttcatgtaaaagttgttatactaaataggataaattttggagtctcttttcactcgtagataaagtgggtaatatctaatttggcacttgagtcctaacattatgtaactttagctaggttggggtgggtttagaatgtttccctagtcatctcagtttgttccattttctgactctatcctgcaaacaaaaatggcaatgacactttatcctgactctttccttcttagtttgtgcctatcttattattttatgtgatattatcctattaaatgtataaaaatattaaaaaaaaaaaaaaaaaaa

SEQ ID NO: 232 - DNA, 620 bp, Rattus norvegicus
  Genbank Accession No. NM_033234
tgcttctgacatagttgtgttgactcacaaactcagaaacagacaccatggtgcacctgactgatgctgagaaggctgctgttaatggcctgtggggaaaggtgaaccctgatgatgttggtggcgaggccctgggcaggctgctggttgtctacccttggacccagaggtactttgatagctttggggacctgtcctctgcctctgctatcatgggtaaccctaaggtgaaggcccatggcaagaaggtgataaacgccttcaatgatggcctgaaacacttggacaacctcaagggcacctttgctcatctgagtgaactccactgtgacaagctgcatgtggatcctgagaacttcaggctcctgggcaatatgattgtgattgtgttgggccaccacctgggcaaggaattcaccccctgtgcacaggctgccttccagaaggtggtggctggagtggccagtgccctggctcacaagtaccactaaacctcttttcctgctcttgtctttgtgcaatggtcaattgttcccaagagagcatctgtcagttgttgtcaaaatgacaaagacctttgaaaatctgtcctactaataaaaggcatttactttcactgc

SEQ ID NO: 233 - DNA, 1552 bp, Rattus norvegicus
  Genbank Accession No. NM_033351
tcagttctgtaattaattaactaacgtggatcaaatgagaaggtgaaagttcacacaggagcactcctgtcgtcttggactgggtctccatcccaccatccagtgccctggtctacgaagagtccacagggaccttgtgaagaatcaacaaggcggggtccagaggagtcacgtgtgccttccactccgggtcgccctgtcaggatggggatgtcccagcccggggtcctcctcagcctcttattggtcctcctgcctcagacctggggagcggagccccgtctcccactgatgtatcatcttgcagctgtgtctgacttatcaacggggcttccctctttctgggccacgggctggctgggtgctcagcaatatctgacctacaacaacctgcggcaggaggctgacccctgtggggcctggatatgggaaaaccaggtgtcttggtattgggagaaggagaccacggatctgaaaagcaaagaacagctcttcttggaggccatcaggaccctggagaaccaaataaatgggaccttcacactgcagggcctgctgggctgtgaactggcccctgataattcttcattgcccacggctgtgtttgccctcaatggtgaggagttcatgcggttcaacccaagaacgggcaactggagtggggagtggccggagacagatatcgttggtaatctgtggatgaagcaacctgaggcggccaggaaggagagcgagttcctgctaacttcttgtcctgagcggctgctaggccacctggagaggggccgtcagaacctggagtggaaggagccgccatctatgcgcctgaaggcccgtcctggcaactctggctcctcagtactgacctgtgctgctttctccttctacccgccggagctcaagtttcgattcctgcgcaatgggctagcctcaggctctgggaattgcagcactggtcccaatggtgatggatctttccatgcatggtcattgctagaggtcaaacgtggagatgaacaccattaccaatgtcaagtggagcatgaggggctggcccagcctctcactgtggacctagattcgcccgccagatcttctgtgcctgtggtcggaatcattcttggtttattgctggtggtagtggccatcgcagggggtgtgctgctatggaacaggatgcgaagtgggctgccagccccatggctttctctcagtggtgatgactctggcgacctattgcctggtgggaacttgcccccggaggctgaacctcaaggtgtaaatgcctttccggccacttcctgatgccaacccaggccccatacccattgcagcctgtggggctgtgtgacctcctgaactgtctctgagcctcccgagggagccctgggctggatgtcctcctcgtggatcccttcttttgtggcctgcttcagtttcccctcttaatgtcaatggctatttccatctccacataaatttgggcccaaatctgtgtgtgcatcgttattctcaggtttcaggcagccggaataaattgaacaagtttgag

SEQ ID NO: 234 - DNA, 5531 bp, Rattus norvegicus
  Genbank Accession No. NM_033352
  misc_feature (1)..(5531): n = a or c or g or t
gagggactcgcccccggtggatgcggtggagtttgagctttttgctgcatccgtccctgaagaacaaaataagagtaagggagacaagctgcagagcatgggaggctgtggggttttctgaaacgtttgctgggctctccgcggagcatgagcttttaaaaggagttctttggagagaaatccatttgtgttagctggaaaaatgatacacatgctaaatgcagcagcctatcgggtgaaatggaccagatccggtgctgctaaaagggctgcctgcctggtggctgcggcatatgctctgaaaaccctctatcccatccttggcaggcgtttaaagcagcctggccaccggaaggcgaaagcagaagattacccgcctgcagagaacagagaaagactgcattgcacagagatcatctgtaaaaaacctgcgccgggactaaatgcagattttttcaaacagctactagaacttcggaaaatcctctttccaaaacttgtgaccactgaaacggggtggctctgcctccactcggtggctctaatctcacgaacgtttctgtctatctacgtggctggtctggatgggaaaatcgtgaaaagcatcgtggaaaagaagcctcggactttcatcatcaaactagtcaagtggcttatgattgccgtccccgctacctttgtcaacagcgctatcaggtacctggagtgcaaactggcattggcctttagaactcgcttagtggaccatgcctatgagacctattttgcaaatcagacttattataaggtgataaatatggacgggaggctggcaaaccctgaccagtctcttactgaagacattatgatgttctcgcaatcggtggctcacctgtattccaaccttaccaaaccgattttagatgtaattctaacctcctataccctcatccggacagctacatccagaggagcaagccccatcgggcccaccctgttagcagggctcgtggtgtatgccactgctaaagtcctgaaagcttgctcgcccaaatttggtactctggtggctgaagaagctcatagaaagggctacttgcggtatgttcactccagaatcatagccaatgtggaagaaattgccttctacagaggacataaggtagaaatgaagcaactgcagaagtgttacaaggctttagcttaccagatgaaccttattctatccaaacgtttgtggtacatcatgatagaacagttcctgatgaagtatgtgtggagcggctgtggactaattatggtggccatacctatcatcactgcaacaggctttgcagatggtgatctggaggatggccctaagcaggctatggttagcgatcggacagaggcctttaccactgctcggaatttactggcctctggagctgacgcgattgagaggattatgtcttcatacaaagagatcactgaactagcgggttatactgccagagtgtacaacatgttctgggtcttcgatgaagtgaagagaggcatttataagagaactgtcactcaggagcctgaaaacaatagcaagagtggaggtggcctggagctgcccctcagtgacaccctggcaatcaaagggacagtcattgacgtggatcatggaatcctttgtgaaaatgttcccataatcacgccggcgggagaagtggtggcttccagtctgaacttcaaagtagaagaagggatgcatcttttgataaccggccccaatggttgtgggaaaagctctctgttcagaatcttaagtgggctctggcctgtgtatgaaggagtcctttataaaccacctccccaacatatgttctatattccacagaggccgtacatgtctcttggaagtcttcgggatcaagtcatttatcctgactcggtggatgacatgcatgagaaaggttatacagaccgagacctagagcatattctgcacagcgtccacctctaccacatagtccaaagagaaggaggatgggatgcagtcatggattggaaagatgtcctttcaggaggggagaaacagagaatggggatggcacggatgttttaccataaaccgaagtacgcattgctggacgagtgcaccagtgctgtgagcattgacgtggaaggaaagatatttcaggctgctatcggggctggcatttccttactgtctataacgcacaggccttctctgtggaaataccacacccacctattgcaatttgatggcgaaggaggttggcgctttgaacagttggacactgctatccgcttaacgttaagcgaggagaaacagaagttggagtcgcagctcgctggaattcccaaaatgcagcagagactcaatgaactgtgcaaaattttgggggaagactcggtgctgaaaacgatccaaactgcagaggacacatcctaactgaccttgacatgttttaagttaacttctaggtgatgcctcagagactctttctttactgcatgcagtatgttaagctaagtgaagagaaagcaagccagcaaaaaaaaaaaaaaaagtattttgtatgatttcagcatcgaggaaatatgataactttttcgaatgaaaaaaaaagcgaacgaattagttgcggttagtcatgactcaggttagtgccccgtgagaggctagctcacctgtaaagtgggtttctagattaggagagtgtgtgtggttcttcctaggagagaatgccccaaaacaagacagcaggggcaccagctgggccgatgtcaggaattagacctttgagggctctttcaacccaggtaacggggacaataggtgcaacacctggaatctatagtcagcattgctaggggccaactcaaactgtgtacaaagtagcaggctgtttgatacatagtttcagtctgaaaagggtgtatccgaatgacagtggttgaaaacaagcacggctagacaagtataaagtactgtattaaattttttcataccttgagcatcttaatacagatacagaaattaacattaataaaaattgtgtgtatgtgtttaaaaaaaaacccttttatgttttaaaaagagaattgcccatacagaagaggacggtctgaacgatatttgttctggctaccgcttgactctgcagtcctatttagtacggtttctgtccagaaatactgtctgtctggtgcccaaaatggcattttagaaacttgattgctgccctaaatatggatcctggaaatcacagttatgttcctacattcattttaccttactccatcttttaagacatacaagtttttgttcctttttcttctgaaacgcgcgcgcgcacacacacacacacacacacacacacacacacacacacacacacagatttactttaatcacatgatttattttggaagagctgtagcgatcatgaaggtctccctcccccacacaccagacccagtgctgtcatcactaatggcccttaaatttaactgggatataatgtcagttttaaaangatgtggaccaggcagatggccagaaatggttgtaggcaaagcagggcataagggaaaaaattaaagcagataaataaatattattcaggcatagaagagtgacagttgcttctcttgtaggggacctgagttccattgccaacatccacatggtggctcaaacgtgtgtctaattccagctccaggggatctgacatacatgtagactccagggatcctgcatacatgtagtcctcatacacacatacatgcagacaaaacattcatagcattaaaaatcaataaatctgaaagatagtaaggatattgaaagctggcaatgttgatgttaccatcacttaattactgtttgcgagaagtgaaaattgagtgagaaatgcaatgggcgttggtcaacgcagctcggctgtgcacacccacctgatgccgaagtgtctgcagtgccagcgctcaggagggcagtacattgcacttccggtaagcttcacgctgctgaagatgacagagaccctcacatcatatgaaatacagtgcatctggagtacaaaaccacgactaatgctttaatctcatcctctctcagacatgacgaggtatgtgaaaacccgagatgaacagttttaggggcttaaggttttgtttctgtattcagacagcgctttagcagacactaactctcgataacagacggtttggaagacagaccccctagaagtcattcacaatgatggtcgtgagaaattgcagcatttccacattttcaattccgcaaaaatctacacaatttgaattaccaatcactgtgaccaccttacacaaaacaatacaaggtcataatcagtacctttgtatttgtctgttactgctacttcttactaataatgtgggacactaatgaaatatttggtttagcaaaagtataaaaccagaaattgacactgaattaaaaaaaaaaacacacaattcactaatctcttaacaaccgtgctagcagttacccaggttatagtgctaaaggagaatcatttgaagcaagggtcttatattagctctgacaagcacaagaggaaaattgaaagttcacatttgaaattataccatttcagacttaaaataaaccatgtaagacctgatatcctacgttttcaagctttgcgaaagatgccaacatcaatgctacattcggaactagaccttatttagtagaggttaccagcgagctggatcgaaataaataagactcgttacacagtggatgggggttcaacgatgtttggaattcggtactaaaactctagtcacgaaatttaaacgttaaggtttcaggactaactgtttcccagtagccttttggtaactactgatttaatgctggatatctttttttttcttttttttctttttttttccagagctggggaccgaacccagggccttgcgcttcctaggcaagcgctctaccactgagctaaatccccaaccccactactgattttctgaactgcctcttctgagccagagtaccctccgtcttagagggagaacccgatgtggatctgtgttgtgtataatctgactctttccaaagtgctcccacgggagaccagagctgatactctgacaggcatacttgtgaaaacacaaagaccactgagacctcttctttgactaggacaaagaataataaggaagacgaaggatagcttcatctgtcaaactactttttttttccttagaaaaggcataaatgtatggagttcgattatttcggggaataactcaaaacctgcattgtgacatccgatctctggagcatgctatggtatgccaagcacccaagcacactgtgttcactcttacagacgagataattgctaaaatcctcttgagtcacaaggtcggtgatcgtacttgaaaaccagcccagttcaccctatgtttacacgggaagagttttcctttgatagcaatttgacttttgacccaaattttggcgtgtcaataaaggtataagc

SEQ ID NO: 235 - DNA, 781 bp, Rattus norvegicus
  Genbank Accession No. NM_053289
aaaccatccagatctctgcaagacagctaaggaggagcagaaagatgatgagagttaagatgttgcatcgcttggccttcccagtcatgtcctggatgctgctctcctgcctgatgctcttatcacaggtgcaaggagaagactctccgaagaaaataccctctgcacgcattagttgccccaaaggctcccaggcatatggctcctactgctatgccctgtttcagataccacagacctggtttgatgcagaactggcctgccagaagagacctgaaggacaccttgtatctgtgctcaatgtagctgaagcttcattcttggcatccatggtcaagaacactggaaacagctaccaatatacctggattggactccatgaccccactcttggtggagaacccaatggaggtggatgggagtggagtaacaatgacataatgaattatgtcaactgggagaggaacccatctactgccttagaccgcggattctgtggcagcttgtcaagatcttctggatttctaagatggagagataccacatgtgaagtgaagttgccctacgtctgcaaatttacaggttaaaattaccagacagcaaacagctttagtttgtcctgaagcacatcctgtcaaggggcaaaatatgaagacttgcgtagaaaaagtgtattctatctacagtccacattggagctctaatcattctttagccaattttgtataagttgtgtcctcatgtcttggaaagcagtaataaacctcagtctctcttcgaa

SEQ ID NO: 236 - DNA, 1754 bp, Rattus norvegicus
  Genbank Accession No. NM_053290
cagtgcaagcgcgcaggcgcgaccggggggggggggcgggctgcgaggagaatctcagcgatcctcagttactgccgcatcctctgccggtcgtcatggctgcctacaagctggtgctgatccggcatggcgagagcgcctggaacctggagaaccgcttcagcggctggtacgatgccgacctgagcccagcgggccacgaggaggcgaagcgcggcgggcaggcgttgcgagatgctggctatgagtttgacatcgtcttcacctctgtgcagaagagagcaatccgcaccctctggacagtcctggatgccattgaccagatgtggttgccagtggtacggacctggcgtctcaatgagcgacactatgggggactaacaggtctcaataaagcagagactgctgctaagcatggtgaggcacaggtaaagatctggagacgatcttacgatgtcccgccacctccaatggagcctgatcatcccttctacagcaacatcagcaaggaccgcaggtacgcagaccttactgaggaccagctaccctcctgtgagagcctgaaggatactattgccagggcactgcccttctggaatgaagaaattgttccccagatcaaggaggggaaaggggtcttgattcctgcccatggcaacagctacgggggcattgtcaagcatctggagggtctgtcagaagaggccatcatggagctgaacctgccaactggtatacccatcgtctatgaactggacaagaacttgaagcccatcaagcccatgcagtctctgggagatgaagagacggtgcgtaaagccatggaagctgtggctgctcagggcaaggtgaagaagtgaaggcgaggaggcggactcctgccctgaacaccctctctccctgcttgttcctgcctcctgcaccctcccctgcacctgccacactgactacatctttaggatcttcagtttaagttgtagctgcagataggacctgtggctcccattctccttttagtattttatccccggcacccactccttcatagaatctagtcagaagaagacctctggggctgcaggctcttggtccatatccagggacggctccctgttacaggagagagttgagtagatagtaattatatcccccttagctctttgtttactaagggtctgcttaggaagaaggtcgggagggactgtatgtggtatgaccaatgaggagagaagctgtggtccagttttgtccctggaacctgtcctgcactcttcccacaattaggtaactgggggcctagtcattccagtggagagtgaaatgaacctcatgccgattaaaaagaccctactttctctctgaccctaaaggacgtcgtggccctagaaggttgggaacagtcttgtcaagtctatgtgtgttaacatttatttttacaaaaataaagtatatatacatatatcagcacaaaagcaacgaggttgctagtggcagttgagagtcctaagtggtcaccagaaaaaaagccattcctcagatcaaatgggataaactccttgtacctcttgctgtgttttggatccctttgccttgttttgtaagaggtgaagccccttgatcatgtccaaggttttgtctttcactgtctgaatcatgtttccagctgcttgaccctactgtgtgggttcagaactcgtttgggcataacaactaagtctctttccagtcagtataataaaggagtgatgtgcaat

SEQ ID NO: 237 - DNA, 1675 bp, Rattus norvegicus
  Genbank Accession No. NM_053291
ggcctctctccgggcctctcgacctcacggtgttgccaaaatgtcgctttctaacaagctgactttggacaagctggacgtgaaggggaagcgggtcgtgatgagggtggacttcaatgttcctatgaagaacaaccagataacgaataaccaaaggatcaaggctgctgtcccaagcatcaaattctgcttggacaatggagccaactcggttgtgcttatgagccacctgggccgtcctgatggtgtgcccatgcccgacaagtactccttagagccagttgctgcagaactcaaatctctgctgggcaaggatgttctgttcttgaaggattgtgtgggctcagaagtagagaatgcctgtgccaacccagcggctgggactgtcatcctcctggagaacctccgctttcatgtagaggaagaagggaagggaaaagatgcttctgggaacaaggttaaagctgagccagctaaaattgatgctttccgagcctccctgtccaaacttggagatgtctatgtcaatgatgcttttgggactgcacacagagcccacagttccatggtgggtgtgaatctgccacagaaggctggtggatttttgatgaagaaggagctgaactactttgccaaggctttggagagtccagagcgacccttcctggctatcttgggaggagctaaagttgcagacaagatccagctgatcaataatatgctagacaaagtcaatgagatgatcatcggtgggggaatggcttttaccttccttaaggtgctcaacaacatggagattggcacatctctgtatgatgaagagggagccaagattgtcaaagatctcatgaccaaagctgagaaaaatggtgtgaagattaccttgcctgttgactttgtcactgctgacaaatttgatgagaatgcaaagactggccaagctactgtggcctctggtatacctgctggctggatgggcttggactgtggtactgagagcagtaagaaatatgctgaggctgtggctcgagctaagcagattgtttggaacggccctgttggggtatttgaatgggaagcatttgccaggggaaccaagtccctcatggatgaggtggtgaaagccacgtctaggggctgcatcactatcataggtggtggagacaccgccacttgctgtgccaaatggaacacagaggataaagtcagccatgtgagcactgggggcggcgccagtttggagctcctggaaggtaaagtccttcctggggtggatgctctcagcaatgtttagtattttcctgccttttggttcctgtgcacagcccctaagtcgacttagtgttttccgcatctccatttggtgttagtgcagctagtggccaagacgagcaccaggaacctaagcagcagctgcacagcatctcagctcgtctttactgcatgggattcattatagttaagtccatttaatttcttagtgactaaaccttgcattaaggcatatatttatactctgcctgtgaaaggaagtgagctgtaaaagcttagctctcttcgctgtatgtagcctctggttagcctgtcactgttcatgacagcatggaaataacgatgaggattccagctgtaggtttgggaggttgatgatattgaaccaataaaagatcccact

SEQ ID NO: 238 - DNA, 554 bp, Rattus norvegicus
  Genbank Accession No. NM_053330
ctttccgccggggcagccatcttccagtaactcgccaaaatgacgaacacaaaaggaaagaggaggggtactcggtatatgttctctagaccttttaggaaacatggagtcgttcctttggccacatacatgcgaatctacaagaagggtgatattgtagacatcaagggaatgggcactgttcaaaaaggaatgccccataagtgttaccatggcaaaaccggaagagtctacaatgtcacccagcatgccgtgggcatcattgtgaacaagcaagttaaaggcaagattctggccaagaggatcaatgtgcggattgagcacatcaagcactcaaagagcagagacagcttcctgaagcgggtgaaggagaacgatcagaagaaaaaggaagccaaagagaagggcacctgggttcagcttaacggccagcctgcgccacccagagaagcccactttgtgaggactaacggaaaggagcctgagctgctggagcccattccatacgaattcatggcctaatgtatacaaaggaaataaagaacccgaactgc

SEQ ID NO: 239 - DNA, 1421 bp, Rattus norvegicus
  Genbank Accession No. NM_053338
aaggttgcagacgtgacagagacaaggctccgagtctgaacaggggtctgcgagtgggtctatctgattccccagtggtctgtgccgcagcgctgatcaagtgctgatagcatctgtgcaagagtcgacggcgattccgacacgatgaccctgaatggaggcagcggagcgggcggcagccgtagcgcgggccgggagcgcgaccgtcgtcgaggcagcaccccatggggcccggcacccccactgcaccgcaggagcatgccggtggacgagcgagaccttcaggcggcgctaaccccgggctccctggcagcgactgcagctggaactcggacacaggggcagaggctggactggcctgaaggctcctccgattcgctcagttctggagacagcggctcagaggatggcgtttacaaggtgcatgctgctggggcgcctggtgtgggcaagagtgctctggcgcgcatctttggtggagtagaagacggacctgaagcagaagctgcagggcacacatatgaccgttctatcactgtggatggagaagaagcatcactaatggtctatgacatttgggaacaggatggaggctgctggctgcctggccactgcatggccatgggggatgcatatgtcattgtgtactcaataacggacaagggcagctttgagaaagcctcagaactccgggtccagctgcgcgcacgcagacagacagatgtgcccatcatcctagtgggcaacaagagcgatcttgtgcgctctcgtgaggtctctgtggatgagggccgggcttgcgcagaggtcttcgactgcaagttcatcgagacctccgcagcactgcatcacaacgtccaggcactgttcgagggtgttgtgcgtcagatacgcctgcgcagggacagcaaagaggataatgctcgtcgacaagctggcactcgacgacgggagagccttggcaagaaggccaaactctttctgggccgcatagtagctcgcaacagccgcaagatggcctttctggccaagtccaagtcctgccatgacctctctgttctctaagcccaacggcccccttgtttgtgggtcagcagatggatggaaggctgcccagccaactgctctaaatgtctcagagttggcccaccctccggtatttctcagaactgtcaactatgcacagcctgtctcacggtcatggacagatagtgctgaccagggaggcaactccaaacgccatcgagcctgggcctatggagatgcatgtgcaggcccacgtgcataccgagcagcctgaaccctgctcttggacaggactctgcctttctccatgtgggtgtctgcctggagggaggctgttctatatgcttgctgtttgtttacatgcagctttttgtaataaagactatttcctgaca

SEQ ID NO: 240 - DNA, 2153 bp, Rattus norvegicus
  Genbank Accession No. NM_053347
atggaggactcgggaaagacttttggatcagaggaggaagaaacaaactattggagagacctggccatgacctacaagcagagggcagagaatactcaggaggaactccgagaattccaggaaggaagccgggaatatgaagctgaattggagactcagctgcagcaagctgaaaccagaaaccgggacctattatcagagaataaccgccttcgaatggagctggagtctgtgaaggagaagtttgaaatgcagcattcagagggttaccggcagatctcggccttggaggatgacctggctcatacaaaagccattaaagaccaactgcagaaatacatcagggagctggaacaagccaatgatgacctggaaagagccaaacgagccacaatcatgtccctggaagactttgagcagcgtttgaatcaagccattgaaagaaatgccttcctagagagtgagctggatgagaaggaaaatcttctagaatctgtgcagagactgaaggatgaagctcgagatcttcggcaggaattggctgtgcagcagaagcaagacaagccccggacacccatgcccagctcaggggaaaccaaaaggacagacatggctgtacaggccacaggctctgcaccatctactccaataactcaccaaggatccagctctggtttgaacacaccagaaacgttcagatgtggcctgggcagtcccagtagtggaaccccactcacacctgcagcccggatatcagccttaaacatcgttggggacctgcttcggaaagttggggccctggagtccaaactagcatcatgcaagaacttcatgtatgatcagtccccaagccggaaaagcgggccagccttgggccgaggaaccaaaaacagagacggtattgacagaaggccaggcagcaccgctgtgggcgataaagggtcaggaaaacgcttggagtttgcgaagccgtcctcacagctctcatcaccagcgctgccatccacccagggtgtggtcaagcttttgctttaggaccagtgggaactgcgccctcacctatcttccctactttatagtcagcttttagttatttttttttcaaggtaatttgagaaataagagaccacatcaccagcatttactttgtgctatgcagcctaagctaaggctgtgtgtggcccagtccctagcagtggatgtcactaaaatgagctccccaaccccaaccaggcagctctaaggtatgatttcattgactacctagagttttaatagcctccagaggtgctttgaatatgcgtaatcttcagagcaggactaaagcccagctcaggagctctctgcagcctacttccagctgaagctatattctggaacatttcctggtgcttttaaagcatgattaaattttatctaggactgggagactacagaggcaaaaggctatatttaaaccatctgctaaaagtactactcatgtacctttgacacttcaacactgttggcctcataggtcagtgggaggttatcctctacagataaaccctgactcgtgtctctcctgagtcccctgccctggtgttgggagtggcatgtgcatcaggaccctggacagcttgcgttggactggcctttgttacaccatccctaagaacagaacttcatctagcagcttcttccagacaccacagagcaaccagggtgactgaagcacgagatggagattaccaccagctgctccatcggatgtggaaaaatcagcacaggctctacaatgccagctcgcctcatctctggtgtgtgatgcttgctgcctcacacttcgatccacaatgagaaaagcacacttatactagagcgtgacaccctccacttggctactaacttatttcctagttgatgagcaaaactggcctagcatcagacctagaactttgtgtgtgctactgacattcacagggtgattttaagctgcttggttatttgttctccttagacataataactggggaaagatgaactttattttttataaaaaataaaaccaaaagaaatgcctgttcaatagatgtgtgtgtcagtccttccatgtctgtgcacgtggccatgaagtttgttttgttcaaccaagtaattaaatatttgaaccc

SEQ ID NO: 241 - DNA, 4474 bp, Rattus norvegicus
  Genbank Accession No. NM_053356
atgctcagctttgtggatacgcggactctgttgctgcttgcagtaacgtcgtgcctagcaacatgccaatctttacaaatgggatctgtacggaagggccccactggagacagaggaccgcgtggacaaaggggcccagcaggtccccgaggcagagatggtgttgatggtcccgttggccctcctggtccccctggtgcccctggcccccctggtccccctggcccccctggtcttactgggaactttgctgctcagtattctgacaaaggagtttcagctggccccggaccaatgggcttaatgggacccagaggccctcctggtgctgtcggagcccctggccctcaaggtttccaaggacctgctggtgagcctggtgagcccggacaaacgggtcctgcaggttcccgtgggccagctggccctcctggcaaggccggtgaagatggtcaccctggaaaacctggaagacctggcgagagaggagtcgttgggccacaaggtgctcgtggtttccctgggactcctggacttcctggcttcaaaggcattcgaggacacaacggtctggatggattgaaaggacagcctggtgcccagggtgtgaagggtgaacccggtgcccctggagagaatggaaccccaggtcaagcaggagcccgagggcttcctggtgagagagggcgtgtcggagctcctggtccagctggtgcccgtggcagtgatggcagtgttggccccgtcggccctgctggtcccattgggtctgctggtcctcctggtttcccaggtgctcctggtcccaagggtgaacttgggcctgttggtaaccctggccctgctggtcctgctggtccccgtggtgaagcgggtcttccgggtctttctggccccgttggacctcctggcaaccctggagcaaatggcctcactggtgccaagggagccactggactccctggtgttgctggggctcctggtctccccggtccccgtggtattcctggccccgttggtgctgctggtgccactggtcccagaggacttgttggtgaacctggtcctgctggctccaaaggagagactggtaacaagggtgagcctggctctgctggagcccaaggtcctcctggtcccagcggtgaagaaggaaagagagggtcccctggagagcctggatctgctggtcctgcagggcctccagggctgagaggcagccctggttctcgaggtcttcctggagctgatggcagagctggtgtgatgggccctcctggcaatcgtggttcaactggccctgctggagtccgaggtcctaatggagatgccggtcgccctggagaacctggtctcatgggacccagaggtcttcccgggtctcctggaaatgttggcccagctggtaaagaaggccctgtgggtctccctggcatcgatggcagacctggcccaattggcccagctggaccaagaggtgaagctggcaacatcggattccctggacccaaaggcccctctggtgatcctggcaaacctggtgagaaaggccatcccggtctcgctggtgctcggggagctccaggtcccgacggcaacaatggtgctcagggccctcctggacctcagggtgttcaaggtggcaaaggtgaacagggccctgctggtcctccaggcttccagggtctcccgggtccctctggtaccgctggagaagttggcaagccgggagaaaggggtcttcccggtgaattcggtctccctggtcctgctggtccaagaggagaacgtggtcccccaggtgagagtggagctgctggtccttctggtcctattggaatccgaggtccctctggagccccagggcctgatgggaacaagggtgaagctggtgcagtcggtgctccaggctctgctggtgcctctggtcctggtgggcttccaggagagaggggtgctgctggcatacctggaggcaaaggagaaaagggtgaaactggtctcagaggtgaaatcggcaaccctggtagagatggtgctcgaggtgctcctggtgctataggtgcccctggtcccgctggagcctcaggtgaccggggcgaagctggtgctgctggtccttctggccctgctggtcctcgaggtagccctggtgaacgtggtgaggttggtcctgctggccccaatggatttgctggtcctgctggttctgctggccaacctggtgctaaaggagaaaagggaaccaaagggcctaagggagaaaatggcatcgttggtccaaccggacctgtcggagctgctggcccatctggtcctaatggcccacctggccctgctggaagtcgtggtgatggagggccccctggtatgactggcttccctggtgctgctggacggactggtccccccggacccagtggtattactggcccccctggtccccctggtgctgctggtaaagaaggtattcgtggtccccgtggtgaccaaggtccagttggccgaactggagaaataggtgcatctggtccccctggatttgctggcgagaagggtccttctggagaacctggtaccacaggaccccctggcactgcaggtcctcagggtcttcttggtgctcccggtattctgggtctccctggctctcgaggtgaacgtggccagccaggtattgctggtgctctgggtgaacctggtcctctgggcattgcaggccctcctggggcccgtggtccccctggtgctgtgggcagtcctggagttaatggtgcccctggtgaagccggtcgtgatggtaaccctggcagtgatggtcccccaggtcgtgatggtcaacccggacacaagggagagcgtggttaccctggcaacattggtcccactggtgctgcaggtgctcctggtcctcatggttctgtgggtcctgctgggaaacatggaaaccgtggtgagcctggtcctgctggttctgttggtcccgttggtgctgtcggtccaagaggtcctagtggccctcaaggtattcgaggtgacaagggagagcctggtgacaaaggggccagaggtcttcctggcttaaaaggacacaatggattacagggtcttcctggtcttgctgggctgcatggtgaccaaggagctcctggtcccgtgggtcctgctggtcccaggggtcctgctggtccttctggccccattggcaaagatggtagatctggacatcctggaccagtcggtcctgctggcgttcgtggctctcagggtagccaaggtcccgctggtccccctggtccccctgggcctcctgggcctcctggtgtcagcggaggaggctatgactttggtttcgaaggaggcttctacagggctgaccagcctcgctcacagccttcactcagacccaaggactatgaagttgatgcaactctgaaatctctcaataaccaaatcgagacccttctcactcctgaaggctctagaaagaaccctgcccgcacatgccgtgacttaagactcagccacccagagtggaagagcgattactactggattgaccctaaccaaggatgcactatggatgccatcaaagtgtactgcgatttctctactggtgaaacctgcatccaggcccaacctgtcaacaccccagccaagaatgcatacagccgtgcccaggccaacaagcatgtctggttaggagagaccatcaatggtggcagccagtttgaatacaacgcagaaggggtgtcctccaaggaaatggcaactcagctcgccttcatgcgcctgctagccaaccgtgcttctcagaacatcacctaccactgcaagaacagcattgcgtacctggacgaggagacaggccgcctgaataaggctgtcattctgcagggctccaacgacgtcgaacttgttgctgagggcaacagcagattcacctacactgtccttgtcgatggctgctccaaaaagacaaatgaatgggacaagacagtcattgaatacaaaacgaataagccatctcgcctgccattccttgacattgcacctctggacatcggtggtactaaccaagaattccgtgtggaggttggccctgtctgtttcaaataagtgaactcaacctaaattaaaaaacaaaaacccctgaaaaaaactttctctttgccatttcttcctttaaaaaaaaaaaaaaaactgaaagctgaatccttccgtgttttctatgcacctacatcttaaactgtgggcaaaagagaaggattggtcagagcagtgtgcaatatgatccagataagtcccctccctcaggccctccccaaaacgtttgcagtgttatttctgtgggtttttttttaaacactctgacacctgttgtggacattgtcaacctctgtaagaaaacccaaataaaattttaaaaataaaataaaaagaaacccatgaacatttgcaccaaaaaaaaaaa

SEQ ID NO: 242 - DNA, 519 bp, Rattus norvegicus
  Genbank Accession No. NM_053401
aggaggactacgcggcaagggataggcccaggaaaacgaagaaatggagcagcccctgcagaatggacaggaagaccgccccgtgggaggaggtgagggccaccagcctgctgcaaacaacaacaaccacaaccataaccacaaccacaaccacaaccacaaccacaatcatcaccggagaggacaggcccgccgacttgcccctaactttcgatgggccattcccaacaggcagatgaatgatgggttgggtggagatggagatgatatggaaatgttcatggaggagatgagagagatccggagaaagcttagggagctgcagttgagaaattgtctgcgtattcttatgggggagctctctaatcaccacgaccatcacgatgaattctgccttatgccttgacttcggtcatttcccctgagattcatactgtgattcccgctgtattcctagcccttgcattttcctgacatgcctttaaatgacccgttttgtggtgagccttggtgttattt

SEQ ID NO: 243 - DNA, 2037 bp, Rattus norvegicus
  Genbank Accession No. NM_053433
ctctttcagactttcgagaagactaggggtttagacacagagaagaaaggaagacaaataaaaggccaccatgaagaggaaagtggcagtcattggggctggtgtcagtggtctggctgccatcaggagctgtctggaggagggactggagcccacgtgctttgagaggagtgatgacgttgggggcctgtggaaattttcagaccacacagaagagggcagggccagcatttaccaatcggtcttcaccaactcttccaaagaaatgatgtgttttccagacttcccctatcccgatgactttcctaacttcatgcataacagcaagctccaagaatatatcacttcatttgccacagaaaagaaccttctaaaatacatacagtttgagacacttgtaaccagaatcaataaatgtcctgatttctcaaccactggcaaatgggaagttaccactgaaaagaacagtaaaaaggaaacagctgtctttgatgctgtaatgatttgttctgggcaccatgtatatccccatctaccaaaagactcctttccaggtctgaaccgtttcaaaggcaaatgcttccacagcagggactataaggagccaggaacatggaaaggaaaacgagtcctggtgattggcctggggaactcaggttgtgacatcgctgcggaactcagtcacgtggctcagcaggtcatcataagctccagaagtggttcttgggtgatgagccgggtctggaatgatggctacccttgggacatggtggtgatcacacgatttcaaacatttctcaagaacaacttacccacagccatttctgactggtggtatatgaagcagatgaacgcaagattcaagcatgaaaactacgggttgatgcctttaaatggaacactcaggaaggagcctgtgttcaatgatgagcttccagcccgcatcctgtgtggcactgtgtccatcaagcctaatgtgaaggagttcacagagacctccgctgtgtttgaggatgggactgtgtttgagggcattgactgtgtcatcttcgccacaggctatggttatgcctaccccttcctggatgacagcatcatcaaaagcagaaacaatgaggtcaccttgtacaaaggcatcttccctcctcaactagagaaaccaaccatggcagtgattggccttgtccagtccctgggtgctgccatccccacaaccgacctgcaggcacgctgggcagcacaagtaataagaggaacttgcattttgccttctgtaaacgacatgatggatgatattgatgagaaaatggggaagaagcttaaatggtttggcaacagcaccaccattcagacagattacattgtttatatggatgaattggcctccttcatcggagcaaagcccaatatcctatggctgtttctcaaggaccccaggttggccatagaagtgttctttggcccttgcagcccctaccagttccggctggtaggcccagggaagtggtcaggagccaggaacgccatcctaacccagtgggaccggtcactgaagcctatgaagacccgtgtcgtcggtggtattcagaaaccttgcttgtattcccattttctcaggctcctggctgttccagtgctcattgctttgttcctcgtgttgatctgattgagattccctctagaatgtctgcgagtcaccgacaataaccagacaagaactttgctatttaaaattaaggttttcatacctctccctttcctgttcaagatcatttgccagaactctagacatttattagtaagcaagacaatgttttgctctggccttgtaaataagtcacctttcagaatcatgctgacccgcagtgagcataagtcatttctcctaagttccactaacaatttgtaacaagaatggtatttttatggacaacttgaatcatctcctgaaagggttgaacagattccatttctcttttaaacgatgcttaaaagatatacttcagatctggacagggaataaagtacagcatttag

SEQ ID NO: 244 - DNA, 1629 bp, Rattus norvegicus
  Genbank Accession No. NM_053453
cgggtgtctgagaatgcaaagtgccatgttcctggctgtccagcacgactgcgtacccatggacaagagcgcaggcaacggccccaaggtcgaggagaagcgggagaaaatgaagcggacactcttaaaagattggaagacccgtttgagctatttcttgcaaaactcctctactcctgggaagcccaaaactggcaagaaaagcaaacagcaaacttttatcaagccttctcctgaggaagcgctgctctgggcagaagcatttgatgaactgctggccagcaaatatgggcttgctgcattcagagcgtttttaaagtccgagttctgtgaagaaaatattgaattctggttggcttgcgaagacttcaagaaaaccaaatcaccacagaaactgtcctcaaaagcaaggaaaatatacaccgacttcatcgagaaggaagctcccaaagagataaacatagactttcaaacaaaaactctgattgcccaaaatatccaagaggctacaagtggctgcttcaccacagcgcagaagagggtgtacagcctgatggagaacaactcttatcctcgtttcttggaatcagaattttatcaggacttgtgtaaaaagccacagatcaccacggagccccatgctacatgagacagggagacccccaccgaggacattccattctgtctcccgagagcaaaggctgtaacctgccagaaaaaaaaaacaaactgaccttgaattcagcctgagtgttaggaaaacatcgctcagaactattgattcaatgttgggtagtgaatcaggaagccagcaacctaggagagtctctgtgagaagtttcccttgctgtgtgaagagcagagggagggaacagggttctgaatgggttcgtccctgtcaggaaagcagggtgtgagatgaaagatacaatggaatgttgttggagcatttaaaatcaataggtctgggattatgtggccttagctagctggctgtacacctttccctgaactagtccatgttaccacgtagtggttttagttctagttttaatattttagtactaagtaacattataatgtttactgtgtgcaagggtgttgactgacgttcttaggactacagatcattaatactattgtgtcatgtatcactgaaactgaaaaagcgtgtttgcattgttaaatggtgtgtgtgatagagtgaatgctgtgccgtgctgtagaaccagtgtccgttccgagtgccaaaaactgtcttgcgggcagctaaactctgaagtggtttttgaatacttttgaataaatttattttgctaaataatgtcattgaacatttggaagtccagatgtggttctgttgttcgatttcagtaactggaaacatgtcagatataagagagaatgactttctagtaaagaggtatcagtgtgggttaattgttgtgcctgtccactgagaaatcgacagccctgagaagtgaagaatgattgcttccaggaagatgttctctttaatcctatagacatgatgtagtcttaagaaaatcagatcacattcctaggaccactcattgtgaaagtcaaatgtgttatttaataaaaaaaaaaaaaaaaaaaaaaaaaaaa

SEQ ID NO: 245 - DNA, 1268 bp, Rattus norvegicus
  Genbank Accession No. NM_053464
gaggttgtgctggggctccgcgcggcctgcagtcccgggcccgcgacgcgcgccgcccgcccgccatggagcctggccccgacggcccagccgcgcccggccccgccgccatccgtgagggttggttccgagagacctgcagcctgtggcctggccaggccctgtcgctgcaagtggagcagctgctgcaccaccggcgctcgcggtaccaagacatcctcgtcttccgcagtaaaacctacggcaacgtgctggttctggatggcgtcatccagtgtaccgagagggacgagttctcctaccaggagatgatagccaacctgccgctctgcagccaccccaacccgcggaaggtgctgatcatcgggggtggagatgggggcgtcctacgggaagtggtgaagcacccctctgtggagtctgtggtccagtgcgagatcgatgaggatgtcattgaggtctctaagaagttcctgcctggcatggccgttggctactccagctcaaagctgactctccacgtgggcgatggctttgagttcatgaagcagaaccaagatgcctttgatgtcatcatcaccgactcctcagaccccatgggccctgctgagagcctcttcaaggagtcctattaccagctcatgaagacagccctcaaagaagatggcatcctctgttgccagggcgagtgccagtggctgcacctggacctcatcaaggagatgaggcatttctgcaagtctctcttccctgtggtgagctatgcctactgtaccattcccacctatcccagtggccagatcggcttcatgctgtgtagcaaaaacccgagcaccaacttccgggagcccgtgcagcagctgacacaggcccaggtagagcagatgcagctgaagtactataactcagacatgcaccgcgcggccttcgtgctgccagagttcacccgaaaggccctgaatgacataagctgaatccagtgccactgtaacaccacccgagacctcagttggattggaccaaggagcttccaagctgtctgggaccaccagtcctggaccaaactcccagatgactcttgcccaccaaccaagtgttacaggccccagaatgctgcctggcctgccctgctgggtggactcagtctctgtgtctgtctatctctgtggcgttcagccccacgcctataccagctctgtacagcaccacctatgccctgtgacccaacaaaaaacacgtgtatttataacaaaaaaaaaaaaaaaaaa

SEQ ID NO: 246 - DNA, 1314 bp, Rattus norvegicus
  Genbank Accession No. NM_053467
atgtctggtttgtctggcccactatcctggcctggccctctcctatccgccttgctctttctgttccttctcggccccagctcggtcctcggcatctccttccatctacccgtgaactctcgcaagtgtctccgcgaggagatccacaaagacttgctggttacgggcgcgtacgagatcaccgaccagtctgggggcgctggcggcctgcgcacccacctcaagatcacagattctgctggccatattctgtatgccaaagaggatgcaactaaagggaagtttgcctttaccacagaagactatgacatgtttgaagtatgctttgagagcaagggaacagggcggatacctgaccaactagtgattctagacatgaagcatggagtagaggcgaaaaattatgaagagatcgcaaaagttgagaaactcaaaccactggaggtggagctacggcgcctcgaggacctttcagagtctattgttaacgactttgcctacatgaagaagcgggaagaggagatgagggacaccaacgagtccacaaacacccgcgtcctgtacttcagcatcttttccatgttctgcctcattggactagccacctggcaggtcttctacctgcgtcgcttcttcaaggccaagaagttgatagagtaatgaggctcagtcttctgtcccctggagccagcagaacatcgctgggacgtgcctggcctagcccaaggccaagttactaacagtatatcaaggcgcacgtgagcatcttgccagaactgatccttctggtgtgggagagcatgggcaccacccacacccagcaagtcagagaggactttttaatgcagtaggatttggactggtttgcaacaagattattaaagtcgcctatggaaaaacaaaacaaaacaaaacaacaaacaggggttacctagataacgccaaagccagcattcgtcctgggtcgcctcacaggatcggtttgagctgtttgctttttctctcccacttgctcaccgccttggtcctccactctagttctcctccaagatttctctgacctcggtcagctccttcatatcagttgtctctttggtttccttgtgaaacaccttgaacttctcttggtccttagatgaaatgtttacagagcttctggtgatatccttcataattttatgtcttctaaaagggtcatgggtgggacacaaaacaaagtgagctttgaactgtagataatctcttaaaagaaaatctcattttagaccattaaaatgtttgtgctcaaaaaaaaaaaaaaaaaaaaaaaaaaaa

SEQ ID NO: 247 - DNA, 1886 bp, Rattus norvegicus
  Genbank Accession No. NM_053483
tctgcagcaaccatgtccaccaatgagaatgctaactcaacagctgcccggcttaacagattcaagaacaaggggaaagacagtacagaaatgcggcgccgccgaatagaggttaatgtggaacttaggaaagctaaaaaagatgaccagatgctgaaaaggaggaatgtcagctcattccctgatgacgctacttctccactacaggaaaaccgaaacaaccagggtactgtaaattggtctgttgaggacattgttaaaggcataaacagtaacaatttggaaagccagctccaagctactcaagctgctcggaaactgctttcaagagagaagcagcctcctatagacaacatcatccgggctggtttgatcccaaaatttgtgtccttcttgggcaaaacggattgtagtcccattcagtttgaatctgcttgggcgctcaccaacattgcttctggaacatccgaacagaccaaagctgtggtggatggaggtgctatcccagcatttatttctctcttggcgtcgccccatgctcacatcagcgagcaagctgtgtgggctcttggaaacattgcaggtgatggctcagttttccgagacttggttatcaaacatggtgcaattgacccactgttggcacttctcgcagttcctgatctgtcatccttggcatgtggttacttgcggaatcttacctggacactttcaaacctctgtcggaacaagaatcccgcaccccccttagatgctgttgagcagatccttcctactctagttcgactcctacaccacaacgatccagaagtattagcagactcctgctgggccatttcctatctgactgatgggccgattgagcgcatcgagatggttgtgaagaagggagttgttccccaacttgtgaagcttttaggagctactgaactgcccattgtgacgccggcactgagagccatagggaatattgtcaccggaacagatgaacagactcagaaagtgatcgatgcaggggcacttgcagtctttcccagcctgctgacaaaccccaaaactaatattcagaaggaggccacatggacaatgtcgaacattaccgccgggcgccaggaccagatacagcaagtggtgaatcacggcctcgtcccatttctcgttggtgtcctctctaaggcagactttaagacacagaaggaagccgcatgggctataaccaactacaccagcggcgggactgttgaacagattgtgtatctggttcattgtggaataatagaacccttgatgaacctcttgagtgcaaaagataccaaaattattcaggttattcttgatgctatttcaaatatctttcaggctgcagagaaactaggtgagacagaaaaactcagtataatgattgaagagtgtggaggcttggataaaattgaagccctacagagccatgagaacgagtctgtgtacaaggcctcgttgaacctaattgagaagtacttctcagtggaggaagaggaagatcaaaatgtggtgccagaaactacctctgaaggcttcgccttccaagttcaggatggagctcccgggacctttaacttctaatgtccagccaaagcacaaagttgttagctatgtgctgtgctgtgctgtgttctcataaatttgtcttactgtttctctactaagaactctttttaaatgtggtttgttattgtagcactttttacaaaagaaactatacttgaacagttataaactgtacatactctatgaagctgtcctctgagtttatttctatgtggaatttcgtaccctgtcgggtcctgtaaataaagatttaagttccattcttcttttaaaaaaaaaaaaaaaaaaaaaaactcgag

SEQ ID NO: 248 - DNA, 291 bp, Rattus norvegicus
  Genbank Accession No. NM_053485
cagtggtcagtcatggcatgccccctggatcaggccatcggccttctcgtggctatcttccacaagtactctggcaaggagggtgacaagcacaccctgagcaagaaggagctgaaggagctgatccagaaggagctcaccattggtgctaagctgcaggatgctgaaattgcaaggctgatggatgatctggaccgtaacaaggatcaggaagtaaacttccaggagtatgttgccttcctgggggccttggctttgatctacaatgaagctctgaaataaaatgggaag

SEQ ID NO: 249 - DNA, 1857 bp, Rattus norvegicus
  Genbank Accession No. NM_053523
aagacaccaagtgtcgttgtggggtcgcagacggctgcgtcgccgcccgttcggcatccctgagcgcagtcgagcctccagcgccgcagacatggagcccgagccacagcccgagccggtcacgctgctggtgaagagccccaatcagcgccaccgcgacttggagctgagtggcgaccgcggttggagtgtgagtcgcctcaaggcccacctgagccgagtctaccccgaacgcccgcgcccagaggaccagaggttaatttattctgggaagctgctgttggatcaccaatgtctccaagacttgcttccaaagcaggaaaagcgacatgttttgcacctcgtgtgcaatgtgaggagtccctcaaaaaagccagaagccagcacaaagggtgctgagtccacagagcagccggacaacactagtcaggcacagtatcctggggattcctcaagcgatggcttacgggaaagggaagtccttcggaaccttcctccctctggatgggagaacgtctctaggcctgaagccgtccagcagactttccaaggcctcgggcccggcttctctggctacaccacctacgggtggctgcagctctcctggttccagcagatctatgcaagacagtactacatgcaatacttggctgccactgctgcttcaggagcttttggccctacaccaagtgcacaagaaatacctgtggtctctacaccggctcccgcccctatacacaaccagtttccggcagaaaaccagccggccaatcagaatgcagccgctcaagcggttgttaatcccggagccaatcagaacttgcggatgaatgcacaaggcggccctctggtggaagaagatgatgagataaaccgagactggttggattggacctactcagcagcgacattttccgttttcctcagcattctttacttctactcctccctgagcagattcctcatggtcatgggcgccaccgtagtcatgtacctgcaccacgtcgggtggtttccattcagacagaggccagttcagaacttcccagatgacggtccccctcaggaagctgccaaccaggaccccaacaataacctccagggaggtttggaccctgaaatggaagaccccaaccgcctccccgtaggccgtgaagtgctggaccctgagcataccagcccctcgttcatgagcacagcatggctagtcttcaagactttctttgcctctcttcttccggaaggcccaccagccctagcaaactgatggcccctgtgctctgttgctggaggctttcacagcttggactggatcgtcccctggcgtggactcgagagagtcattgaaaacccacaggatgacgatgtgcttctgtgccaagcaaaagcacaaactaagacatgaagccgtggtacaaactgaacagggcccctcatgtcgttattctgaagagctttaatgtatactgtatgtagtctcataggcactgtaaacagaaggcccagggtcgcatgttctgcctgagcacctccccagacgtgtgtgcatgtgtgccgtacatggaagtcatagacgtgtgtgcatgtgtgctctacatggaagtcatagatgcagaaacggttctgctggttcgatttgattcctgttggaatgttgcaattacactaagtgtactactttatataatcagtgacttgctagacatgttagcaggacttttctaggagagacttattgtatcattgctttttaaaacgcagtgcttacttactgagggcggcgacttggcacaggtaaagcctttgccgggttttctgttcaataaagttttgctatgaacgacaaaaaaaaaaaaa

SEQ ID NO: 250 - DNA, 2458 bp, Rattus norvegicus
  Genbank Accession No. NM_053536
atacggagccgggccgcacgcgcgaggccgtgccaggcgacgccgagtccaggcagtcctgttctgggtcctgggacaccgtgtgcactgaatttgcgtgactgtacagacgctaagtgctcagtatgtggaagttgttgagtattcgtataccctacgtataggagccacgtcacactggcagcaaacagatgtgcgcacagagacgttgtgctgctttcctgaggttgcacagctgacagctgcagacaagtcaccacaggctcggccaggccagcatggtggaccacttgcttccagtggacgagaccttctcgtcaccgaaatgcccagtgggatacctgggagataggctggccagccggcagccataccacatgttgccctcgcccatctccgaggatgacagcgatgtctccagcccctgctcttgtgccagccctgactcgcaagccttctgttcctgctacagtgcaggtccgggccctgaggcccagggcagcatcttggatttcctcctatcccgggccacactgggcagtggtggtgccagtggaggtgtcggagatggcagtggccctgtgacctggggatcgtggaggagagcctctgtgcctgtgaaggaggaacatctttgcttccctgaatttctgtcaggggaccctgatgatgtctccaggcccttccagcctaccctggaggagattgaagaattcttggaagagaacatggaggctgaggtcaaggaggccccagagagcagcagcagggacctggaagcctgtagccagctctcagctgggtcacaccggagccacctccatccagagtccggtgggagagagtgccgtatcccaccaccaggtggcaccagtgggggtggtacccaaggtgcaggtgaggggtcagctcatgatggccccatgccggtgctactgcagatccagcctgttgctgtgaagcaggaagcaggtgcagggccagcctccccagggcaggccccggagagcgtcaaggtcgcccagcttctggtcaacatccaggggcagacctttgcactcctgcctcaagtggtaccatcctccaacttgaacctgtcctcaaagtttgtgcgaattgcgcctgtgcccattgccgccaaacctattggctcaggatccctagggcccggccctgctggtctccttgtgggccagaagttccccaagaacccagcagcagaacttctcaaaatgcacaaatgcactttcccaggctgcagcaagatgtacaccaagagcagccacctcaaggcccacctgcgccggcacacaggcgagaagccctttgcctgcacctggccgggctgcggctggaggttttcacgctcagatgagttgtcacggcaccgacgatctcactcgggtgtgaagccgtaccagtgtcccgtatgcgagaagaaattcgcgcggagtgaccacctctccaaacacatcaaggtgcatcgcttcccacgaagcagccgcgcagtacgcgccatcaactgagcgcagtggccgccctcccctcccccacctccacattttgtttttaaatgcaataacttattgcctctttcagaaggatgtgacaatattaccagtcccccttctgaatcttaggaggtatgacccagagccgccgtggctgcctttccggggaggacccagagtccccaaggtccctgggggctggttccccggtggcccaggtggcccaggcaggcctgtgcccttgtgcctttgtgccttcctgccagctggaagcagtgtttggggggcccttgccctcctcccattgggctccctaccagggccaaagccaacattatcactggggaaggagtgttttggctgtgtcgaaatagtagctcccagaggaagccatgctgagaaaaaggaagtaggtcaaaagcgcagggctgtactgtggtgcgaggaccgccatatgcaagaggcctctgagggtccaggaggatggccaccctcgctctaggccctaacgcaagtgcttaaatgcaagacaaatggagccatatccatccatacccagcctggctcaccctcctccagacgccaacctcctggctgtggtgggaagcgaaaggagcaggtctggtggatgcaaagcgactagctagcgcctcccagtctgacttagatccgcattcctcgtcaggtctagaaattagtaccaattgaactagcttgtttcgacaggtctgtttcacatcctatgaatgtatgtaaataaactgtacataggtgcgcatctacataaaatatcttttaataacacgttgacatttgtgtaaatttgaaatttaaaaaaattctatgaagtcagtgtacatatgttacaattatgtatattttctttggtccttcataaaaaatatatttactttgccaataaaaagagagaaaaaaaaaaagaactc

SEQ ID NO: 251 - DNA, 863 bp, Rattus norvegicus
  Genbank Accession No. NM_053565
cgctggctccgtgcgccatggtcacccacagcaagtttcccgccgccgggatgagccgccccctggacaccagcctgcgcctcaagaccttcagctccaagagcgagtaccagctggtggtgaacgccgtgcgcaagctgcaggagagcggattctactggagtgccgtaaccggcggcgaggcgaacctgctgctcagcgccgagcccgcgggcacctttcttatccgcgacagctcggaccagcgccacttcttcacactgagcgtcgagacccagtcggggaccaagaacctacgcatccagtgcgaggggggcagcttttcgctgcagagtgacccccggagcacgcagccagtgccccgctttgactgtgtactcaagttggtgcaccactacatgccgcccccaggggccccttccttttctttaccaccgacggaaccttcctttgaggttcaggagcagccacctgcccaggcactccccgggggtacccccaagagagcttactacatctattctgggggcgagaagatcccgctggtactgagccgacctctctcctccaacgtggctaccctccagcatctttgtcggaagactgtcaacggtcacctggactcctatgagaaagtgacccagctgcctggacccattcgggagttcctggaccagtatgatgctccactttaaagagcaaagaaagggtcagagggggcctggatcggtcgcctctcctccgaggcacatggcacaagcacaaaaatccagccccaatggtcggtagctcccagttagcccagcagaagataggcttcttcctcaggccctccactccgcagagtagagctggcaggacct

SEQ ID NO: 252 - DNA, 1869 bp, Rattus norvegicus
  Genbank Accession No. NM_053582
ccaccatgtggggatgtccgctagggctgctattgctgctgctggctggccaggctgccctggaggcccggcggagtcgttggcgcagggagctggcgccagggctgcacctgcggggcatccgggacgccggtggcagatactgccaagagcaggacatgtgctgccgcggccgtgctgacgagtgtgctttgccctacctgggagccacctgttactgtgacctcttctgcaaccgcaccgtctctgactgctgccctgacttttgggacttctgcctcgggattccaccccccttccctcctgtccaaggttgcatgcatgcgggccggatctacccaatcttcggaacctattgggaaaactgcaatcggtgcacctgccatgagaaagggcagtgggaatgtgaccaggagccatgtctagtggacccagccatgattaaagccatcaaccggggcaactacgggtggcaggctgggaaccacagtgccttctggggcatgaccctggatgagggcattcgataccggctgggcacaatccgcccatcttcctctgtcatgaatatgaatgaaatttatacagtgctgggacaaggagaagtgctacccactgcctttgaggcttccgagaagtggcccaacctgatccatgagccgctggaccagggcaactgtgcgggttcctgggctttctccacagcagctgtcgcatctgaccgagtgtccatccattctttgggacacatgacacccatcctctcaccgcagaacctgctatcctgtgatacccaccaccagaagggctgccgaggtgggcgtctcgatggtgcttggtggttcctgcggcgccgaggggtggtgtctgataactgttacccattctccggccgtgagcagaacgacgaggccagccccactcctcgatgcatgatgcacagccgcgccatggggcggggcaagcgccaggccacttctcgctgccccaatagtcaggttgattccaatgacatctaccaggtcacgcctgtctaccgcctggcctccgatgagaaggagatcatgaaggagctaatggaaaatggccccgttcaagcgcttatggaagtacacgaagacttcttcttgtaccagcgaggcatctacagccacacacctgtaagccaggggaggccagagcagtaccgccgacacgggactcactctgtcaagatcacagggtggggagaagagacactgccagacggaaggacgatcaagtactggactgctgccaactcgtggggcccatggtggggtgagaggggccacttccgaatcgtgcgtggcatcaacgagtgtgacatcgagaccttcgtgctgggcgtctggggccgcgtaggaatggaggacatggggcaccactgagtctcggccactaagctaggtgggatccacagccacggaagaggccttgggggccacgccgatgaggccttgggaccaggtgctaatcccctcagactcagatccacacaaacgcagaaccccacctgggagctaatgtccctcagggagcaacagtgaggctggagggaaccctcagacatcacagccggaactggaaagggcccggcttggaaactgcagggagtaaaattcccaggcccctggtcagccagcccaagaccatgggagctaagacaccccaacctctttatcctcctacccaacctcattcttattttttcattctctttggtggattctgcccatccccctggcctccgttctggctggacctttccatcctcaacactgctttcttactctttaaaaatatttatttttcttttcattaaaataaaaccaaagtattgataattgc

SEQ ID NO: 253 - DNA, 4469 bp, Rattus norvegicus
  Genbank Accession No. NM_053596
cgtgcggtcggagcgtagagctcagcgcagagcaccgggagccggagccttagcgggaggtgcatccaaagcccggccgttcggagcccgcgagcgatgatgtcatcctacaagcgggccacgctggacgaagaggatctggtggactcactctccgagggcgatgtgtaccccaatggcctacaggtgaacttccgcagcccccggagcggacagaggtgctgggcagctcggacctcggtggagaagcggctggtggttctggtgacgcttctggcagcagggctggtggcctgcctggcagccctaggcatccagtaccggacaagaacgcctccggtatgtctgactgaggcctgtgtctcagtgaccagctccatcctaaactccatggaccccacggtagacccctgccaggacttcttcagctacgcctgtggtggctggatcaaggccaaccccgttcccgacggtcactcacgctgggggaccttcagcaacctctgggagcacaaccaagccatcattaagcatctgctggaaaattccacggccagcgcgagcgaggcagagaaaaaggcgcaagtgtactaccgtgcgtgtatgaacgaaactaggatcgaggagcttcgggccaagcccctgatggagctgattgagaagctcggaggttggaatatcacaggaccctgggccaaggacaacttccaggacacgctgcaggtggtcacagcgcactaccgcacctcacccttcttctctgtctatgtcagtgccgactccaagaactccaacagcaatgtgatccaggtggaccagtccggccttggcttgccctccagagactattacctgaacaagacggaaaatgaaaaggtactgactggctatctgaactacatggtccagctggggaaactgctgggtggtggggacgaggactccatccggccccagatgcagcagatcctggattttgagaccgctctggccaacatcaccatcccccaggagaagcgccgggatgaagagctcatctaccacaaagtcacggctgctgagctgcagaccttggcacccgccatcaactggttaccctttctgaatgccattttttacccagtggagatcaatgagtctgagcccatcgtggtctacgacaaggaatacctcagacaagtctccacactcatcaacagcaccgacaaatgcctgctcaacaactacatgatgtggaacctggtacggaaaacaagctcctttctcgaccagcgctttcaggatgccgatgagaagttcatggaggttatgtacgggacaaagaagacctgtcttccccgctggaagttttgcgtgagtgacacagaaaacaacctgggctttgccctgggccccatgtttgtgaaagcaacctttgcggaggacagcaagaacatagccagcgagatcatcctggagatcaagaaggcattcgaggagagcctgagcaccctgaaatggatggatgaagatactcggaggtcagccaaggagaaggcggacgccatctacaacatgataggctaccccaacttcatcatggaccccaaggagctggacaaagtgttcaatgactacacagcagttcccgatctctactttgagaacgccatgcgatttttcaacttctcattgagggtcacagccgaccagctcaggaaagcccccaacagagatcagtggagtatgaccccgcccatggtgaacgcctactactcgcccaccaagaacgagattgtgtttccagctggaatcctgcaggcgccattttatacccgctcttcgcccaacgccttgaactttggtggtatcggggtcgttgtggggcacgagctgactcatgctttcgacgatcaaggccgggagtatgacaaggatgggaacctccggccctggtggaagaactcgtcggtggaggcattcaagcagcagaccgagtgcatggtacagcagtataacaactacagtgtgaacggagagcccgtgaatgggcggcacaccctcggggagaacatcgcggacaacgggggactcaaggcagcctaccgggcgtaccagaactgggtaaagaagaacggagctgagcagatactgcccaccctgggtctcaccagcaaccagctcttcttcctgggattcgcacaggtctggtgctcggtccgcacaccagagagctcccacgaaggcctcatcaccgatccgcacagcccctcccgcttccgggtcatcggctcactctccaactccaaggagttctcagaacacttccgctgcccgctcggctcccccatgaaccctcgccacaaatgcgaagtctggtaagggctgaagcgcagagaacacaggtggaagaagggaaggggcctgcagccagctcccgggaacagggccgcgctgtcaccctccttccagcccctcggccgagggccccttccccaccctggagggtatgcagccatcttgtctaagcctatgccagaggctcagcactggaagccaacatttgacccccttcgaagctccagcatcccagacacccttgagtgatgctataccgggcctttgggtgtgtcaagctggtggcttgccagccctgggcctcacactgacaatggcagtgggacaggaccctttgccacgtccaatgccagatataccacaataccactgtgtcaaatgctttaaagatatattttttggggagactattttttaagcattatggaatacactggaaatcttcagggaaaatgcatttaaaacacttttttttaaaaaaagattagtatatttattatgttctctcttttttttctaaacaacctgcggacaaaggaaaccccactgattgaccccaggggaccccaggctgttgagcaggccaccagtttgagcactgctttagcccattgttggtgtaattgcttgtgcagtcaggagatgtaggggccaggcagaaggggtggccagctgaagggcctgatttatgagcatggccttctctgtcctgtctccggagtccaaccatgggaaccccaacaaggacgggctgttacccaagttgatccctatggcagtacaaagccagagtaatggcctccgtacaaccgggggacccctgaacactctggacaacatcacaggagcccgtcggggctgagaccccacaccccatcagatgcacactattgtccaaagatgtcttgttttggtcccacctcttctggccttgggaccggttgcctctctgtagcagttctgacatcctgaagtggtcgccctctgtaccaggggaaaggggaaagagaaagcagtccagttctccctccaagctccgtagcctgtagttaccctggcttggctcctgggaccccttctctagtgccttaccccaggccacagcccctgagcccctttgaggaggcagcatttgtcttgctttctcagtggagcccccaagtgtcctgactagaagccaacaccatagccccactcccagaagccccagggtaccgtcccaaaccctacaggacagccattccacacattccccaccccacccccctctgcagcaggccaagactggaaggttcccagccccatcgggctccagggaatggcaggatgtcatccacccacagcatcacctaacagatatgtgggcctccactaagtggcgctcactgaggttttcatgactgctgtagggagcaagctcttgtgacctgtgtgtgaggagcgcagtagaagtgcccatcacagcccctggcaagtcatgcccccacatagcacaacacacacacacactcacctggaagccagagtcctccttggccaagacgcagagacagtgtagtctcggtcctgctagcgtagcgatagtcttagcactgggatggggagctgcaagcgggtgtctggcaaggttcttggtccctgtgaacacattcgaggtctcagctcttcggggaaaagtaacacaggaagcaggaaggtgctggagccacgccctgccacacaggggggaccttctgggtgggatcatctgccctttctatcccctcgccctgcttccccacaggtggccgtcctggatgccagtatctagaagcagggtcctgagctggagttagccatgcacgcattgctcagggtgtgcagggagccaaggcaggaaaacccaggctggttagggatggatgggtgcaaaagcagcatcccgacccctgtccctccagagatttgagaagggcagaattaggaagggcacccgccctcagaaagagccctcctctcaagcccggagtttccctgcaggcacaaggacatggggtttggaactggggactctatttttttgtattattgtgttttgtgctactgtagttttggtgtggcacctattataattaaaataaagtacttatacc

SEQ ID NO: 254 - DNA, 336 bp, Rattus norvegicus
  Genbank Accession No. NM_053597
cggcacgagcgacctccctacgagaacatgcctctcgcaaaggatctccttcatccttctccagaagaggagaagaggaaacacaagaaaaagcgcctggtgcagagccccaattcctactttatggatgtgaaatgcccaggatgctataaaatcaccacggtctttagccatgcacaaacggtagtcttgtgtgttggctgctccactgtactctgtcagcctacaggtggaaaagcaaggctgacagaaggatgctccttcaggaggaagcagcactgaaagcccctgattcaagatgagtgggaacgttcccaataaacacattttggatat

SEQ ID NO: 255 - DNA, 2140 bp, Rattus norvegicus
  Genbank Accession No. NM_053603
  misc_feature (1)..(2140): n = a or c or g or t
ggcaccagatcccttagctcgctcttccttttagccccctgctggatcttggagtctgctctttccgtttgacacctgggactccgagctcttctctcagacatagctgtccttgcttggagaaattgatgagaaactgttagtcttaaaagaaaaaaaaaattaaacgccgtgcagaagagaggcccctcgctgtgagcaggagcctgaagcgctgcagaggtggcgcctctccggcccgggaccgtggtccggggcgccgacggcatgacggactcagcgacagctaatggggacgacagggaccccgagatcgagctcttcgtgaaggctggcatcgatggagagagcattggcaactgtcctttctctcagcgtctcttcatgatcctctggctgaaaggagtcgtgttcaacgtcaccaccgtggatctgaaaagaaagccagccgatctacacaacctggctcctggcacacacccacccttcctgaccttcaatggggacgtgaagactgatgtcaacaagattgaagagttcctggaggagaccttaacccctgagaagtaccccaaactggctgcaaggcacagggaatctaacactgcgggcatcgatatcttctccaagttttcagcctacatcaaaaacaccaaacagcagaacaatgctgcccttgagagaggcctgacaaaggcgctgaggaagctggatgactacctgaacacccctctgccagaggagattgacaccaacacccatggggacgagaagggctcccagcgcaagttcctggatggggatgagctgaccctggccgactgcaatctactgcccaaactccatgtggtcaagattgtggctaagaagtacagaaactatgacatcccagctgagatgacaggcttgtggcggtacctcaagaatgcctatgcacgggacgagttcaccaacacctgtgcagctgacagcgagatcgagttggcctacgcagatgtcgccaggcgcctcagccgatcctgagcttggccgtctgacccgatttctgctgcagaagaatttcatttctcccaaaggctttcagctctacagactcttcttcaccattgccttggggaggcatcaaaaaagttaggccacatcctactggcacccctgaactcagctccagccttctaccttctaagatcagtgccatccttctgccttgacctgcagaagcccagtaagcagcgaggacgcagtagcagatgtttccacctgctggtctgacctagggtcagtgtgtcaggggtcagtttgcggagctcccatgggattgtcactgttcctttctgccaatgtcataatgctttctcagatgctctaacaactcgaaatgccagcttcccccttcccctccttcctcagcaactgcaaggtgatggacaaatgccatgacatgatcgttagggagagatctatgctttgattggggagagagtggttgggggtagtcagataggtatgactctggatatgtagcagaacagttttgaagacatggtgtttttgtntatagctagagatattccaacacagactatgaatatatttataggagatataaggctaggatctagcttggttgtagagtgtttgcttagcgtgtatgaaggcctgggtcagatctccagcactacgtaaaccaggcctggtagcaaccactggtaatctgagcacaaggaaactgacggcaggaagatcaaggtcagccgcatagcagactggagtccagtctgagctacgtgagacctttccccaaaacaaataaaaacaagtaaaatattcagctgatatttgaatcccctcccccacagtcacctagtttttccatgttataagccaaggagttaactgattagcagctctaattcactgtatatagagacactccaaatgatggtaactctcatttcttgagacctttaactgtggtgagaacagaccttgcttccaagccttactaaatgcaccatgcctttgaatacacaccaagctgaatgctttcttcatatcctcgagccagctgtaaatgcgtttcctggtcttgattggtattttgactgattcaaataaagttggtttattttcaaatatt

SEQ ID NO: 256 - DNA, 978 bp, Rattus norvegicus
  Genbank Accession No. NM_053615
atggcgagcagcagcggctccaaggccgaatttatcgtcggtgggaaatacaaactggtgcggaagatcggatctggttccttcggggacatttatctagcgatcaacatcaccaatggcgaggaagtggcagtgaaactagaatcccagaaggccaggcatccccagttgctgtacgagagcaaactgtataagattcttcaaggtggggttggcatccctcacatacggtggtatgggcaaggaaaagactataatgtgctagtcatggatcttctgggacccagcctcgaagacctcttcaatttctgttcaagaaggttcactatgaagactgtacttatgttagctgaccagatgatcagtagaattgaatatgtgcatacaaagaattttatacacagagacattaaaccagataacttcctaatgggtattgggcgtcactgtaataagttattccttattgattttggtttggccaaaaagtacagagacaacaggacaaggcaacacataccatacagggaagataaaaacctcactggcactgcccggtatgccagcatcaatgcacatcttggcattgagcagagtcgccgagatgacatggaatctttaggatatgttttgatgtattttaatagaaccagtctgccatggcaagggctaaaggctgcaacaaagaaacaaaaatatgaaaagattagtgaaaagaagatgtccactcctgttgaagttttgtgtaaggggtttcctgcagaatttgccatgtacttaaattactgtcgtgggctgcgctttgaggaagctccggattacatgtatctgaggcagctgttccgcatcctcttcaggaccctgaaccaccagtatgactacacgtttgattggacgatgttaaagcagaaagcagcccagcaggcagcctcttccagtgggcagggtcagcaggcccaaacccccacaggtttctaa

SEQ ID NO: 257 - DNA, 4862 bp, Rattus norvegicus
  Genbank Accession No. NM_053623
gccgaggctcgcccctccttgcaaggctgctccagagctagcgggcacgcgagctcctctccgggagcttccttccccgaaaggccgggacccagtggcggactcgtggtgagcgaggcagcaccttcgatcccaggagattgacctgttcttaaaagtgaaagaagaaatctaagaaaaacgctatggcaaagagaataaaagctaagcccacttcagacaaacccggaagtccatatcgctctgtcacgcacttcgactcactagctgtcatagacatccctggagcagatactctggataaattatttgaccatgctgtagccaagtttgggaagaaggacagcctggggacccgggagatcctgagcgaagaaaatgaaatgcagccaaatggaaaggtttttaagaagttaattcttgggaattataaatggataaactatcttgaagtgaactgccgagtgaataactttggaagtggcctcactgcactgggactgaaaccaaagaacaccattgccattttctgtgagaccagggcggagtggatgattgcagcgcagacctgctttaagtacaactttccgcttgtgactttatatgctacccttggcaaagaagctgtcgttcatggattaaatgagtctgaggcttcctatctgattactagtgttgaacttctggaaagcaaactgaaggcggcattattagatatcaattgtgttaaacatatcatttatgtggataacaagactatcaatagagcggagtaccccgaggggcttgagattcacagcatgcagtcagtagaggagctgggatccaagccagaaaactcaagcattcctccaagtagaccaactccttcggacatggccattgtcatgtacaccagtggctctactggccgccccaagggagtgatgatgcaccatagcaatctgatagctgggatgacaggccagtgtgagcgcatacctggattaggaccaaaggacacatatattggctacttacctttggctcatgtgctggaactgacagcagagatctcctgctttacctacggctgtaggattggatattcgtcaccactcacactgtctgaccagtccagcaaaatcaagaagggaagcaagggtgattgtactgtactgaaacctacacttatggcggccgttccggaaatcatggatagaatttacaagaatgttatgagcaaggttcaagagatgaattatattcagaagactctatttaaaattgggtatgattataaattagagcaaatcaagaaaggatatgatgcccctctttgtaatctgatactgtttaagaaggtgaaggctcttctaggaggaaatgtccgcatgatgctgtccggcggtgccccactgtccccccagacacaccgattcatgaatgtctgcttctgctgccccattggtcagggctatgggctgacagaatcatgcggtgctggaacagttactgaagttaccgactacactactggaagagttggcgctcctcttatttgctgtgaaattaaactgaaggactggcaggaaggtggttatacagttcatgataagccaaaccccagaggtgaaattgtgattggaggccagaatatctccatgggatattttaaaaatgaagagaaaacagcagaagattattctgtggatgaaaatggacaaaggtggttttgcactggtgatattggagaattccaccctgatggatgcttacagattatcgatcgtaagaaagatctggtgaagctgcaagccggagagtacgtgtctcttgggaaagtcgaagccgcactgaagaattgtccactgatcgacaacatctgtgcttttgccaaaagtgaccagtcttatgtgatcagttttgtggttcccaaccagaaaaagttgactcttttggcacaacagaagggggtagaaggatcttgggttgatatttgcaataatcctgccatggaagctgaaatactgaaagaaattcgagaagctgcaaatgccatgaaattggaacgatttgaaattccaatcaaagttcgattgagcccagagccatggacccctgaaactggtttggtaacagatgccttcaagctgaaaaggaaggaactgaagaaccattatcttaaagacattgagcggatgtatgggggcaaataaaaggcaactgtctacttcacatttgcacaggaggtggcctgatggtttttttagttctagagtttaagcctttgttgatctctctgttaaaatgtaaggtgaatcttctaaagacatgaaacaaaaaaacaaccaaaagtggttacaataaattgcatagtcctagagaagctgaaattgaagacatttccctttagctgtgttattaagtttagagcaaaaattctgttttagaatattagccttagctacacttgtttttctaaagatactccatgctaaagtaaacaaattggacttggactaggtgtagttgaagaaatctacagcttccagtgtctatgtcttcctagttcagaagtttctatcgtaatcattaggacaaaattacgtattaacactactcaaagccgaagttccaccaggctttgaaatcctcttccaaccatttctcttgaagggaaaaaaatcagttgtaataaatggattcagtatcttagaaggtattattttaagctcataattgccatgtaggtgagacatagaatcattataatattgtgaataattacagtgcctgaagttaaaactaaaacaacacacacataccaaaaatatctcataatgtatttgaagggaggctgaattgctcctttggatgtctaagaacttaaatcagcaactgtaattattgaaatgtcttcagaaaaatgtccactttgtaaaagtgacctttctgtgtgtgatctagtcaaaggctgagaccaaggggaacatgttagaaagtcaatcagaattcaataagatacattgcttttctgttagaaagttcatggcatcctaagcattcagaattaggatcctggcatagcactgagcctgggaaagagatttagcctctttaactttgataccagggcttgattttaaaatgtgcttgtattaaattacatttgtaatttatggtctgtttgctgttgctgattgattcttgatcagtagtgtgcatttcagagagcctttcattttgctttaatttcagcaaagcgggttatgataaatgacttcctcgaatcttgttcaaacctacgggtgattaagtgtcttggatgagtctgaggaagttaaagggaagaaaacactgttaacacttttcctgtttgtgaagagtttagaaactggaaatgctagatttgggagaagggcagagttacttgattaaggactgtctgtgcagtaacttgggagtgtgagtttctttttaaatcttcagctaaaatctggaattatatattcttgatagatattcgcacttgaaccatagttactgtatgtaaaaagcaaaaattcttaatactgttattctttgcacttttttcatagtcattttatacacacacacacacacatgcatgtgtatgtgtgtgtgtatatataatatatatatgttgcttacattgtgttgtacagatgtgggccaccactacaacaaaatgagttctttgtgctctaaaatatttataaagaaattatttaaatgttatgtatatggtggtaatattgagaaaaaaaatcatctggtattctgagcaacagcgaaggtttttgtaaaagtttcttttcagtgttgtgcaaactaaaatttgaggcaagttttccctgaagttctatgtgagtattctcatgcttcccatcttgcctttgaagtgtgaaaagacatcaagtagactactagtcagcttctacctactcctagtgcactgtttatccgtttttttttaaaggcttttccaatatatgtatcccatttggaatggtgattttaaaatgtgagtgcatgcagactatcttacttaagatacttgcaccccacccacagccatctcccaaagctggaacactgccaactaggtccttaagaatcacgcattgaatacaaggtcgggtgctgctaattcttcatgaaaatcctaacacacacgttaagggaccagggagatgccactgccctctgacttttcatcaaaaaaaaaatatatatatacatgtttatgtaaacagaactattttccatattcatagtgactttttaagtatttgagcctaaaggttttgatctccattttatacctatttaaatcgttcacaatttcatgtcagccatcaattaaagctgtgcttactgttgattgtgtgtgcatttctaaggtgaacgctcctaattttttgctttaattacatgaaagggtcttatttctttgatatttgtgctcttttttttaatgtagactgaaggtatgattgtgtgacttttaagaaatgaaataccgatgaatgatccatagagtccaaagtgagggagaatgctgtttctttgttcatagagactgactagtaatctttgcctatattttcctggtagcagatgacaaatgtttctacagtgacaagctgagaagaggttaaaggttaaagattgtgtggcattcgggaactggagagatacgttttaattttgaatgtagttacaaattttatattcatatttgtactttctgttaatgcacgattgtagaattgttctgtagattttttgtgtttactcttgaaaggctttgtttgttcttctttttaagtttgcacttgaatcttataaaataaatc

SEQ ID NO: 258 - DNA, 2207 bp, Rattus norvegicus
  Genbank Accession No. NM_053648
cattttagaggcactatttctagtacaatgggtatgaagctgtgatttgagccgcaaatttcagagcattggccatagaacagacctggtcggtttgatgtcactgtagcttggtttaggcggccggggattgcgtcggtttttaaccctagtgaagggacggctcatgagtgcaggacgtcttcggatgagattagtatacgaattggaagttctattggtaagactacccgattatcaacttctaatagacgaagctcacctggttttaggtcgggacagatggaggcatcaaggagcagagggcaggaagacaggacgctttgagcacacggggctttgtgtctattccactgacaacctcctcactgccacccaccggttccatggagataatatttggccggaataagaaagaacagctggagccattacgggccacagtgacaggcagcattccagcatggctgcaggggaccctgctccgaaacgggcctgggatgcacacagtgggagacagcaagtacaaccattggtttgatggcctggcccttctccacagtttctccatcagagatggggaggtcttctacaggagcaaatacctgcagagcgacacctacaacgccaacatcgaggccaatagaatcgtggtgtctgagttcggaacaatggcctacccagacccctgcaaaaacatcttttccaaagctttctcctacttgtcccacaccatccccgacttcacagacaactgcctgattaacatcatgaaatgtggagaagacttctatgccaccacagagaccaactacatcaggaaaatcgacccccagactctagagaccttggagaaggttgattaccggaagtatgtggctgtaaacctggctacctcacaccctcattacgacgaggctggaaatgtccttaacatgggtacctccatcgcggacaaaggagggacaaaatacgtgatgtttaagatccccgccacagcaccaggcagcaagaagaaagggaagaaccccttgaagcactcagaagttttctgctccatcccgtcccgctcgctgctctcccccagttactaccacagctttggagtcacggagaactatgtggtgtttctggagcagccttttaagctggatatcctcaagatggccaccgcatacatgaggggtgtgagctgggcttcctgtatgacattctgcaaggaggacaagacttacattcatatcatcgaccagaagaccagaaagcctgtgccaaccaaattctacacagaccccatggtggtcttccaccatgttaatgcctatgaggaggacggctgtgtgctgtttgatgtcatcgcctatgaggacaacagtctctatcagctcttctacctggccaacctgaacaaggacttcgaggagaagtccaggctgacctcagtgcctaccctcaggaggtttgctgtgcccctccacgtggacaaggatgcagaagtgggctcgaatttagtcaaggtgtcatctacaacagcaactgccctgaaggagaaggacgaccatgtctactgccagcctgaggtcctctacgaaggcctagagctccctcggataaattatgctcacaacgggaagccatatcgctacatctttgctgctgaagtacaatggagtccagtcccaaccaagatactaaaatatgacgttctcaccaagtcctccttaaagtggtccgaggagagctgctggcctgcagagcctctgtttgtccccacaccgggtgcgaaggatgaggatgatggagtcatcttatcagccatcatctctacagatccccaaaagctgccctttttacttattctggatgcgaaaagttttacggaattggctcgcgcctctgttgatgtggacatgcacctggacctgcatggtttatttattccggatgcaggctggaatgcagtgaagcagactccagccaaaacgcaagaggatgaaaattcagatcatcccacaggtctgacagcaccaggattgggccatggtgaaaatgacttcacggcaggtcatggcggcaagagcctttaatcctagcactcgaggcagaggcaagcagatctctgagttcaaggccagcctggtctacaacacaagttccaggacagccagggatacacagagaaatcctatcttgaaaacaaagcaaag

SEQ ID NO: 259 - DNA, 1690 bp, Rattus norvegicus
  Genbank Accession No. NM_053703
tgaagattgcacgcctgcagcttgcatctttgttgcaaaactagctacagaagagaagcaaggcaaagtcttttgtgctcccctcccccatcaaaggaaaggggaaaatgtctcagtcgaaaggcaagaagcgaaaccccggccttaagattccaagggaagcgtttgaacaacctcagaccagttccacgccgcctcgggatttagactccaaggcttgcatttctattggaaaccagaactttgaggtgaaggccgatgacttggagcctatagtggagctgggacgaggtgcgtacggggtggtggagaagatgcgtcacgtgcccagcgggcagatcatggcggtgaagcggatacgggccacagttaatagccaggagcagaaacggctactgatggatctggatgtttctatgaggacagtggactgtccgtttaccgtgaccttctatggtgcactcttccgggagggcgatgtgtggatctgcatggagctcatggatacgtcactagataaattctacaaacaagttattgataaaggccaaacaattccagaagatatcttagggaagatagcagtttctattgtaaaagcattagaacatttacacagtaagctctctgttatccatcgagatgtcaagccttcaaatgtgctcattaacacgctgggccaagtgaagatgtgtgactttggaatcagcggctacctggtagactctgttgcgaaaacgatcgatgccggttgcaaaccatacatggctcctgaacgaataaatccagagctcaaccagaaggggtacagtgtgaagtctgacatttggagtctgggcatcaccatgattgagctggccatcctccggtttccctatgattcttggggaacgcccttccagcagctaaaacaggtggtagaagagccgtctccacaactcccagcggacaagttctctgctgacttcgttgactttacctcacagtgcttgaagaaaaattccaaagaacggcccacgtatccagagcttatgcaacatccatttttcaccgtccatgaagccaaagcagcagatgtggcgtctttcgtaaaactgatactcggggactaaaaagccacggacttgactggttgaccctactgtggattggtgggtttacagggcgaagtgagttcaccacagcgccaacagaaagtcatcttgagatcattgaaccctgcctctctgaggggcttcctctccctgtttttctttttcctctccgaagggggccttggaatctctagcgtaggctgagctctctatatggatgaaatatgatagaggcttaggactcgaaaaggtgataaaatatttaatggcgaggcatacgaggagtcctcaagcctctgggatctctcgtgttctttacaaaatgaatgcattggccctggtaacaaggtgctacagtagttgacgagattgtaaagtaggttcgtagcgtatcccacttattttaatatttatgtttcagtgcttggttggaaatattccatttttatgcaagaagggagatacagagacaaggctgacttggcagtgtttatagggcttttattttttaagttcaatcatgtctgtggtccagaggaagttatttaatatgcatctttaagaatattataaaaaaaaaatctcaagcaaagggg

SEQ ID NO: 260 - DNA, 2393 bp, Rattus norvegicus
  Genbank Accession No. NM_053713
atcttcgttgacttcggggtttgggtacccctctctcttcttcggactccggaggaccttctgggcccccacattaatgaggcagccacctggcgagtctgacatggctgtcagcgacgctctgctcccgtccttctccacgttcgcgtccggcccggcgggaagggagaagacactgcgtccagcaggtgccccgactaaccgttggcgagaggaactctctcacatgaagcgacttcccccacttcccggccgcccctacgacctggcggcgacggtggccacagacctggaaagtggtggagctggtgcagcttgcagcagtaacaacccggccctaccccggagggagaccgaggagttcaacgatctcctggacctagactttatcctttccaactcgctatcccaccaggaatcggtggccgccaccgtgaccacctcggcgtcagcttcatcctcgtcttccccagctagcagcggccctgccagcgcgccctccacctgcagcttcagctatccgatccgggccgggggtgacccgggcgtggctgcgggcaacacaggtggagggctcctctacagccgagaatctgcgccacctcccacggcccccttcaacctggcggacatcaatgacgtgagcccctcgggcggcttcgtggctgagctcctgcggccggagttggacccagtatacattccgccacagcagcctcagccgccaggtggcgggctgatgggcaagtttgtgctgaaggcgtctctgagcacccctggcagcgagtacaccagcccttcggtcatcagtgttagcaaaggaagcccagacggcagccaccctgtggtagtggcgccctacagcggtggcccgccgcgtatgtgccccaagattaagcaagaggccgtcccgtcctgcacggtcagccggtccctagaggcccacttgagcgctggaccccagctcagcaacggccacaggcccaacacacacgacttccccctggggcggcagctccccaccaggactacccctacactgagtcccgaggaactgctgaacagcagggactgtcaccctggcctgcctcttcccccaggattccatccccatccggggcccagctaccctcctttcctgccagaccagatgcagtcgcaagtcccctctctccattatcaagagctcatgccaccgggatcctgcctgccagaggagcccaagccaaagaggggaagaaggtcttggccccggaaaagaacagccacccacacttgtgactatgcaggctgtggcaaaacctatacgaagagttctcatctcaaggcacacctgcgaactcacacaggcgagaaaccttaccactgtgactgggacggctgtgggtggaaattcgcccgctcagatgaactgaccaggcactaccgcaaacacaccgggcaccggccctttcagtgccagaagtgcgacagggccttttccaggtcggaccaccttgccttacacatgaagaggcacttttaaattccacatcgtggacatgacccacactgccaggagagagttcagtatttttttttaacctttcacactgtcttcccacgaggggaggagcccagctggcaagcgctacaatcatggtcaagttcccagcaagtcagcttgtgaatggataatcaggagaaaggaagagtccaagggacaaaagaaaagaaaagaaaaaaatactaaaaaacaaacaaacaaaaaaaaaaaacaaaagaaaaaaatcacagaacagatggggtctgagactggatcttctatcattccaataccaaatccgacttgaacaagactggacttacaaaatgccaaggggtgactggaagtttgtggatatcagggtatacattaaatcagtgacctggggggagggaagaccagagttcccttgaattgtgcttcaatgatgcaatatacatggaaagaccaccttgtatgctctttgccttctaaaaagccattatgacgtcagaggaagaggaagcaattcaggtacagaacgtgttctaatagcctaaacgatggtgcttggtgagtcgtggttctaaaggtaccaaacgggggagccaaagttctccaactgctgcatactttgacaaggaaaatctatttttgtcttccgatctacatttatgacctaagtcaggtaaataagcctggtttatttctgtaacattttttatgcagacagtctgttatgcactgtggtttcagatgtgcaataatttgtacaatggtttattcccaagtatgcctttaagcagaacaaatgtgtttttctatatagttccttgccttaataaatatgtaatataaatttaaaaaaaaaaaaaaaaaaaaaaaaaaa

SEQ ID NO: 261 - DNA, 2632 bp, Rattus norvegicus
  Genbank Accession No. NM_053748
ctgcagcagggctcatggcagatacccagtacatcctgcccaatgacatcggtgtgtctagcctggactgccgggaggcattccgcctgctgtcacccacagagcgcctctatgcccatcacctgtctagagccgcttggtatggaggcctggctgtgctgctccagacatctcctgaagccccctacatctatgccctgcttagccgcctcttccgtgcccaggaccctgaccagctacgccaacatgccctggctgagggcctgactgaagaagagtatcaggcattcctggtctacgctgcaggggtctactccaacatgggcaactataagtccttcggtgacaccaagtttgtccctaacctgcccaaggaaaagctggagcgtgtgatccttgggagtaaggctgcccaacagcatccagaagaagtcaggagcctttggcagacctgtggggagcttatgttctccctggaaccaaggcttcgacatcttgggctggggaaggagggagtcaccacctatttctctggggattgtgccatggaagatgccaagctggcccaggacttcctggactctcagaacctcagtgcatacaacacccggctcttcaaggtggtcggccaggaagggaagtaccactatgaggtgcgactggcttcagtactcaacacagaacctgctctcgactctgagttgacttccaagctgaagagctacgagttccaggggaatcatttccaggtcacccgtggggactatgcccccatcctccagaaggtggtagaacacttggagaaagctaaggcttatgcagccaatagccaccaggagcaaatgctggcccagtatgtggagagcttcacccagggttccattgaggcccataagaggggctcccgcttctggattcaggacaaaggtcccattgtagagagttacattggcttcattgagagctaccgtgacccctttggctcccgaggagaatttgaaggcttcgtggccatggtaaacaaagacatgagtgcaaagttcgagcggctggttgcaagtgctgagcagctgctgaaggagctgccttggcctcctgcctttgagaaggacaagttcctcacccctgacttcacttccctggatgtccttacctttgccggctctggcatccctgcaggcatcaacatccccaactatgatgacctgagacagacagagggctttaagaatgtgtctctggggaatgtgctggctgtggcctatgccacaaagcgggagaaactcaccttcatggaggaagaagacaaggacctgtacatccgctggaaggggccgtcctttgatgtgcaggtggggttacatgagctgttgggccatggcagcggcaagctctttgtacaggatgagaaaggtgctttcaactttgaccaggagacagtgatcaacccagagactggggagcagatccagagctggtaccggagtggagagacatgggatagcaaatttagcaccattgcctccagctacgaagagtgccgggctgagagcgtgggcctctacctctgtctcaacccccaagtacttcagatctttggctttgagggaactgacgcagaagatgtcatctatgtgaactggctcaacatggtccgggctgggctgttggctttggagttctacaccccagagacggccaactggcgacaggcccacatgcaggcccggtttgtgatcctgagggttttgctggaagctggcgaaggactcgttaccgtcacccccaccacaggctctgatgggcgcccagatgctcgtgtccacctggaccgcagcaagatccggtcagtgggcaaacctgctttggagcggttcctccggagactgcaggtgctgaagtccacaggggatgtggttgcagggcgcgccctgtacgagggctatgcggcggtcactgacgcacccccagagtgcttcctcactctaagggacacggtattgctgcgcaaggaatcccggaagcttattgtccagcccaacactcgcctggaaggctcagaagtgcaacttgtagagtatgaggcctcagcggctggtctcatccgatccttctgtgaacggtttccggaggatgggcctgagttggaggaggttcttacccagctggccacagcagatgctcaattctggagggatcaggtccaggaggccccatctggccaggcttgagaagatctgtgtggcatctcccctttcatcaaaccagggctgtctgtggccctgaattgtgtttaggaggtgggggaagggcaggagctcggactttggtgctacctcagctgagggtggtgatgctaaccccttccatttgtcagcactttccagtttaccattatgtcctcatttcctggatctgcactgccatctgtggtgggagctcaacagggtgcctagtctggttttccaaatgggaaggtggcagttctgagaagtaactgttctagatccagcaggtggcatgtgacagagccagggctcaaagcattctcaccaaatccagtgctcttcgtgtattaccttttatagccagaaaaataaatatgacaaccaccaaaaaaaaaaaaaaaaaa

SEQ ID NO: 262 - DNA, 1860 bp, Rattus norvegicus
  Genbank Accession No. NM_053783
gcacgagctcgggcggcgcgggtaccctgtctagggtgtcctttgctcaggaatgggcccgcagctgcagtcggcaggatgattctgctggtggtcctgatgctgtctgcggagatcgggagtggagctttgatgagcaccgaggatcctaagccgccctcggtgcctgcgccaacaaatgttctaattacgtcctatgacttgaaccctgtcgtacattggaagcaccagaacgtgtcgcaggctgccgtcttcactgtacaggtaaagatgtatccagaatactggactgatgcctgcaccaacattgcccatcattattgtaatatctacaaacacatttcctatcctgactcatctgcctgggccagagttaaggccaaggttggacaaagagaatctgcctatgcgcagtcagaagagtttattatgtgccgaaaggggaaggttggaccgcctggcctggacatcggaaggaaggaagatcagctgattgtccacatatttcaccctaaggtcaatgtgagtcaggaaaccatgtttggtgacggaaatacctgttacacattcgactacactgtgtttgtgaaacattacaggagtggggagatcctacatacagaacatagcgtcctaaaagaagattgtagcgaaactctgtgtgagttaaacatctcagtgtccacgctgaattccaattactgtgtttcagtagttggaaagtcgtctttctggcaagttaatacagaaacatcaaaagacgcctgtatcccctttctccatgatgacagagaagaatcaatttggatgctgcttgttgctcctcttctcttccttacaatagttgtcccggcacttgtgtgttgttacattaagaagaatccatttaagagaaaaagcataatgttacctaagtccttgctctctgtggtaaaaaatgccacgtccgagaccaaacctgaatcaaagtactcccttgtcacgtcgtgccagccagctgtcctagagaacgagacagtgatctgtgaggagcacttgtccacagtgacaactccagacagcctagaagcaccagagcaggaagaactttctaaaggaaccgtggctacggttgctgaaggaaacacttcccccgagaccaccgacagccctctaactccggtacaaagtggccatttttccctgtcaagtagtaaccagtcaggctcctgtagcctcaccacctatcactccagggacggctctgacagtggcctcgtgggcacaggcagctccatatctgactctgactttctcccaaacaacgactcggaaacaaagatggcagacccagcccctacacctgtgaggaaggccctgactttctccggttatgacaaaccacacgtgttggtggacgtgcccgtggatggggagggcaaggagtctttgattgggtatagactcacgggtgatacccaggaactgtcctaaggccgccgagtcctgacggtgctgaaggatctgcctctaggcagttttcctgctttgttctcgtgaaagactttgcacgttagccgattctgaccgcagcgtccctaatgtgacacccggataaggagtctgtgtgagcgcactgcccggtctactccgcaaatgccaagactgccagagggatgaacagtcacctatgagctcctgcctgggtgggctggttctcctcctctagccttgcttcctccagccgctgctcctccacctcactgcctcacgggacacgggggacctgtcctcacacacctttgtatctgtaagtccgtgtatatagtgtgtttgcagtttcactttaagggaaagctgaaagccactgcaggtgactcc

SEQ ID NO: 263 - DNA, 3286 bp, Rattus norvegicus
  Genbank Accession No. NM_053814
gacatgtcggcggccaaggaaaacccgtgcagaaaatttcaggccaacatcttcaacaagagcaagtgtcagaactgcttcaagccccgcgagtcgcatctgctcaacgacgaggacctgacgcaggcaaaacccatttatggtggctggctgctcctggctccagatggcaccgactttgacaacccagtacaccggtcacggaaatggcagcgacgattcttcatcctttatgagcatggcctcttgcgatatgccctggatgagatgcccaccacccttcctcagggcaccatcaacatgaaccagtgcacagatgtggtggatggggaggcccgcacagggcagaagttctccctctgcatcctaacacctgacaaggaacattttatcagggcagaaacgaaggagatcatcagtgggtggttagagatgctcatggtatatcctcgaaccaacaagcagaaccagaagaagaaacggaaagtagagccacctacgccacaggaacctgggcctgctaagatggctgtcactagcagtagtggtggcagcagtggaagcagcagcagcagcagcagcagcagcattcccagtgctgagaaggtccccaccaccaaatccacactctggcaggaagaaatgagagccaaagaccaacctgatgggaccagcctgagtccagttcagagtcccagccaaagccaacctcctgctgcttgcaccccacgggaaacagggctagacagcaaagaagatgaaaacattttaagtggggaccgtgtggatggtggtcggaaagtacgggtagaaagcggctacttctccctggagaaggccaagcaggacctgagggctgaggaacagctgcccccactactctctccacccagccccagcaccccacacagcaggaggtcccaggtaattgagaaatttgaggccttggacattgaaaaggcagagcacatggaaaccaacatgctgattctgaccactccatccagtgacactcgtcagggccgcagtgagagacgggccatccctagaaagcgggactttgccagcgaaacccccacagctcctctctcagatgcttgtcccctgtctccacaccgaagagccaagtcattggacaggaggtccacagaatcctccatgacgcctgacctgctgaatttcaagaaaggctggctaaccaagcagtatgaggatggccagtggaagaaacactggtttgtcctggcagatcagagcctgagatactacagggattccgtggctgaggaggcagctgacctagatggagaaattaacttgtccacttgctatgatgtcactgagtatccagtccagagaaactatggctttcagatacataccaaggagggtgagttcaccctgtcggccatgacatctggcatacgacggaactggatccagaccattatgaaacatgtgctcccaacatctgccccagatgtgaccagctcattgcctgagggaaagaataaaagcacatcttttgatacctgcttaaggccaagtgagaagcaagaagctgagccaggagaaccagatcctgagcagaagaaaagccgtgcacgagagcggaggcgggagggtcgctccaagacctttgactgggctgaattccgccccatccaacaggccctggctcaagaaagggccagcactgttgggtcttctgattctggtgaccctgggtgtctggaagccgagccaggtgagctggagcgtgaacgagctcgacggcgagaagaacgccgcaagcgctttgggatgctggacaccaatgatggaccaggaatggaggatacagccctacgtatggacattgaccggagcccagggctgctgggaacccctgacctcaagacacagaatgtccatgtggaaattgagcagcggtggcaccaagtggagaccacccctctcagggaggagaaacaggtgcccattgcccctctgcacctatccttagaggacagaagtgagcggctctccacacatgagctcacctctctgctagagaaggagctggagcagagccagaaagaagcttcggatcttctagagcagaatcggcttctgcaggaccagttaagggtggccctgggcagagaacagagtgcccgggagggctatgtgctgcaggctacatgtgagcgaggctttgccgccatggaggagacacatcagaagaagattgaagatctacagaggcaacaccagcgggagctagagaagctgcgggaggaaaaagaccgtctcctggctgaggagacagctgccaccatatcagccattgaagccatgaagaatgctcaccgagaggagatggaacgggagttagagaagagccagcggtctcagatcagcagcatcaattcagacatagaagccctgaggcgacagtacctggaggagctacagtcagtgcagcgagagctggaggtcctttccgagcagtactctcagaagtgcctggagaatgcacacctagcccaggcgctggaagctgagcggcaagccctgcggcagtgtcagcgtgagaaccaagagctcaatgcccacaaccaggagctgaataaccgcctggctgcggagatcacacggttgcggacactgctgactagagaaggtggtggggaatccactgggttgcctctcacacagggcaaggatgcctatgagttagaggtcttgttgcgggtcaaagagtcagaaattcagtacctgaaacaggagatcagctctctcaaggatgaactccagacagccctgcgggataagaagtatgcgagcgacaagtacaaagacatctacacagagctcagcatcgcgaaggccaaggctgactgtgacatcagcaggctgaaggagcagctgaaagcagccacagaggcactgggcgagaaatctcctgaaggcactactgtgtcaggatatgacataatgaaatctaaaagcaatcctgacttcctgaagaaagacagatcctgtgttacccggcaactcagaaacatcaggtccaagtccgtaattgagcaggtctcatgggataactgagtcgcgcccgcttccaagtcccctgtcgtagtctgaaggaaggcctgacggtgcaggagcgcttgaagctctttgaatccagggacttgaagaaagattagctgcatccattccactgacacatccttcccagctggtggcagcacaagccaagagtgggtttcatctgtgctttctcattgttgctgtcata

SEQ ID NO: 264 - DNA, 740 bp, Rattus norvegicus
  Genbank Accession No. NM_053819
cggactcctagagacacgctagagcagataccacgatggcgccctttgcatctctggcctctggcatcctcttgttgctatcattgatagcttccagtaaagcctgtagctgtgccccaacccacccacagacagctttctgcaactcggacctggttataagggctaaattcatgggttccccagaaatcatcgagaccaccttataccagcgttatgagatcaagatgactaagatgctcaaaggattcgacgctgtgggaaatgccacaggtttccggttcgcctacaccccagccatggagagcctctgtggatatgtccacaagtcccagaaccgcagcgaggagtttctcatcgcgggccgtttaaggaacggaaatttgcacatcactgcctgcagcttcctggttccctggcataatctgagccctgctcagcaaaaggccttcgtaaagacctatagtgctggctgtggggtgtgcacagtgtttccctgttcagccatcccttgcaaactggagagtgacagtcattgcttgtggacagatcagatcctcatgggctctgagaagggctaccagagcgatcactttgcctgcctgccacggaatccagatttgtgcacctggcaataccttggggtctcgatgacccgaagccttcccctggcaaaagctgaagcctgaacactgtttacctttcctccatctttctttctcttaaatggtgaaataaag

SEQ ID NO: 265 - DNA, 982 bp, Rattus norvegicus
  Genbank Accession No. NM_053835
gggagctgacagcagccacgcggggaagatggctgaggacttcggcttcttctcgtcgtcggagagcggggcccccgaggccgccgaggaggacccggcggccgccttcctggcccagcaggagagcgagattgctggcatcgagaatgactcgggtttcggggcacctgccgccagccaggtggcctctgcgcagcccggactcgcgagcgggggtggttcggaggacatggggactacagtcaatggagatgtgtttcaggaggctaacgggcctgccgatggctacgctgcgattgcccaggcggacaggttgactcaggagcctgagagcatccgcaagtggagagaggagcagaagaaaaggctgcaggagttggatgctgcctcgaaggtgaccgaacaggagtggcgggagaaggccaaaaaagacctggaggagtggaaccagcgccaaagtgaacaggttgagaagaacaagatcaacaacaggatcgctgacaaagcgttctaccagcagccagatgctgataccattggctatgtggcatcggaagaggcttttgtgaaagaatccaaggaggagaccccaggcacagagtgggagaaggtggcccagctgtgtgacttcaaccctaagagcagcaagcaatgtaaagacgtgtcccgcctgcgctcggtgctcatgtccctgaagcagacgccactgtcccgctagtgcctgtcaccacgggccttggtggggcagagcagcagctgcttcagccagggtggaacttctctggcagctgccacacacgcctgttctgttcctctgagtctctgggagctgggaagcgggacccttacccctttcacccaccctgtccttcctggtcccctgttccagcccctcatgactcctgtcagtccacttgattgtgactgtccctcctgatgtatttttcttggcttaaagggtgtgttaactctttttacactt

SEQ ID NO: 266 - DNA, 1318 bp, Rattus norvegicus
  Genbank Accession No. NM_053843
acctcatcagactctgacccagttcttgaatgactttggagacccagatgtttcagaatgcacattctggaagccaatggctactcccaccactgacaatgttgctgctgtttgcttttgcagacaggcagacggcaaatcttccgaaggctgtggtgaaacgtgatcccccatggatccaggtgctcaaggaaggcactgtgacgctgacgtgcgaagggacccacaatcctggaaactcttctacccagtggttccacaaccagagctccacctggggccaggtccaagccagctacacgtttaaggccacagtcaatgacagtggagaataccggtgccgaatggcgcacaccagcctcagcgaccccgtacatctggaagtgatttctgactggctgctgctccagacccctcaactggtgtttgaggaaggggaaaccatcacattaaggtgccatagctggaagaacaaacagctgactaaggtcttgttgttccagaatggaaaacctgtgaggtattattatcaaagcagcaatttttcaatccccaaagccaaccacagtcacagtgggaactactactgcaaagcatatctaggaaggacaatgcatgtgtccaagcctgtcaccatcactgtccaaggttcagcaacggcatccaccagctctctagtgtggttccatgccgctttctgcctagtgatgtgcctcctgtttgcagtggacaccggcctgtatttctgtgtacggagaaatcttcaaacctcgggggaggactggaggaaatccctgtcagtcggaaagtacaaggctccacaggacaaatgacatcccatcgtatggctaaacagcggcagcttcttttcagccacaccgccgcttcatctacagccttcctttgaaagcaacttaccaccaggctggatatttggtcctgcaatcacaactgctaggaggctgaggcaggagggtcaccaaaggctgcccgggttttagagaagagagagtgcaagtctatcctggataacccaataagaccctgggtttagatggcttatcaggaaagagcacccattgctaagctcacagacaagaccacagattgatccctaaggacacagggcaaagggagagaacaaattcctgaaagttgtcctctgacctccacacgtccaccatggcagatgcacacaataaacaaattaaaatgtaatatatatattttaaacaagaggtggggaaaggctgggggttggtggcacagtttttatccaggacacatgatgctctggattttgacctcctataataaa

SEQ ID NO: 267 - DNA, 843 bp, Rattus norvegicus
  Genbank Accession No. NM_053857
gggccgaggtgccgcggggttgctggagggtcgtgggcggcgtgcaggagacatgtcggcgggcagcagttgcagccagactcccagccgggctatccccactcgccgcgtagccctcggcgacggcgtgcagctcccgcccggggactacagcaccacccccggcggcacgctcttcagcaccaccccgggaggaaccagaatcatctatgaccggaaattcctgatggagtgtcggaactcgcctgtggccaaaacacccccaaaggacctgccaaccattccaggggtcactagccctaccagcgatgagcctcccatgcaggccagccagagccatctgcacagcagcccggaagataagcgggcaggtggtgaagagtcacagtttgagatggacatttaagggaccagccataggacgcagtgatgcttctgggcccctggggcccttgggaggagagccacagcagtcaggccttgtacccggcagacactgggtgtggatcggccacccagtcctgctcctcactcagggcacctgctctgccttccattttgtgaataccagcacatacctccttgtgcctctgttgatactgagctgctactccagggtaatgactctcacctacaccctccctgcatcaagcgccagcgagtggacacagaggagtctgtcggaatgatctggcaattctagccccaacctctggagcacacccaccttaccttaggttggggtacctgggaaagccaccctttacttctttccctgagaggaaataaaagccacatttaccctaggcccacagccgggccctgtctgaaaaaaaaaaaaaa

SEQ ID NO: 268 - DNA, 2870 bp, Rattus norvegicus
  Genbank Accession No. NM_053864
gaattccggcgtttgcagccgtcgtttgattagtcgcctctcgcggattaggagctagcgtctcccgcccgcctgccgccccggtgccgctgggaggaagcgagagggaggctgcctgtgggtttgtcactgctgttgctcctccacctgagtgagtcaagcccgggcctagtcggtcgcctaccattctcgtagccgttaccctcaggccgccacagccgccgaccgggagaggcgcgcgccatggcctctggagccgattcaaaaggtgatgatttatcaacagccattctcaaacagaagaaccgtcccaatcggttaattgttgatgaagccatcaatgaagataacagtgtggtgtccttgtcccagcccaagatggatgaactacagttgttcagaggtgacacggtgttgctaaaaggaaagaagagaagggaagctgtatgcattgttctttctgatgacacgtgttctgatgagaagattcgaatgaatagagttgttcggaataacctccgagttcgcctaggagatgtcatcagcatccagccatgccctgatgtaaagtatggcaaacgtatccatgtgctacccattgatgacacagtggaaggcatcactggcaatctttttgaggtataccttaagccgtacttcctggaagcatatcggcccatccgtaaaggagatattttccttgtccggggtgggatgcgtgctgtggagttcaaagtagtagagacagatcccagcccttactgtattgttgctccagacacagtgatccactgtgagggggagccaatcaagcgagaggatgaggaggagtccttgaatgaagtaggctatgatgacatcggtggttgcaggaagcagctagctcagataaaggagatggtggagctgccactgagacatcctgcactctttaaggcaattggtgtgaagcctcctcggggaatcttgctatatggacctcctgggacagggaaaaccttgattgcccgagctgtggcaaatgaaactggagccttcttctttctgatcaatggtcctgaaatcatgagcaaattggctggtgagtctgagagcaaccttcgtaaagcctttgaggaagctgaaaagaatgctcctgccatcatcttcatcgacgagcttgatgccattgcacccaaaagagagaaaactcacggggaagtggagcgtcgcatcgtgtctcagttgttgacccttatggatggcctaaagcagagagcacatgtgatagttatggcagcaaccaatagacccaacagcattgacccagccctacggcgatttggtcgctttgacagagaggtagatattggaatccctgatgctacaggacgtttggaaattcttcagatccataccaagaacatgaaactggcagatgatgtggacttggaacaggtagccaatgagactcatggtcatgtgggtgctgacttggcagccctgtgttcagaggctgctctacaggccatccggaaaaaaatggacctcattgacctagaagatgagaccattgacgctgaggtcatgaattccctggcagttactatggatgacttccggtgggccttaagtcaaagcaacccatcagcacttcgggaaactgtggtagaagtgccacaagtaacctgggaagacattggaggcctggaggatgtcaaacgggagcttcaggagttggttcagtatcctgtggagcatccagacaaattcctcaaatttggcatgactccttccaaaggtgttcttttctatggaccgcctggctgtgggaaaaccttactggccaaagccattgctaatgaatgccaggctaacttcatctccatcaagggtcctgagctgcttaccatgtggtttggggaatctgaggccaatgtcagggaaatatttgacaaggcacgacaagctgccccctgtgtactcttctttgatgagttagattcaattgccaaggctcgtggtggtaatattggagatggtggtggagctgcagaccgagtcatcaatcagatcctgacagaaatggatggcatgtccacaaaaaagaatgtgtttatcattggagctaccaaccggcctgacatcattgatcctgctatcctaagacctggccgtcttgatcagctcatttatatcccacttcctgatgagaagtcccgtgttgccatcctaaaagccaatctgcgaaaatccccagttgccaaggatgtggatttggagttcttggctaagatgactaatggcttttctggagctgacctgacagaaatttgccaacgtgcttgtaaactagccattcgtgaatctatcgagagtgagattaggcgagaacgagagaggcagacaaatccatcagctatggaagtagaagaggatgatccagtgcctgagatccgcagagatcactttgaggaagccatgcgttttgcccgacgttctgtcagtgataatgacattcggaagtatgaaatgtttgcccagacactgcagcaaagtcgaggttttggcagcttcagattcccttcagggaaccagggtggagctggcccaagtcagggcagtggaggtggcacaggtggcaatgtgtacacagaagacaatgacgatgacctctatggctaagtgatgtgccagcatgcagcgagctggcctggctggaccttgttccctgggggtgggggcgctcgcccaatgggaaccaggggtgtgcccatggcctgttccattcctcagtccgaacagttcagccccagtcagactctggacgggggttttctgttgcaaaaaaattacaaaagcgataaaataaaagtgattttcatttggga

SEQ ID NO: 269 - DNA, 794 bp, Rattus norvegicus
  Genbank Accession No. NM_053867
ccgcaccgctccgcgtgcaccgcactcgctccgactgtcaggctagcgccactgtccccagccgtcaccatgatcatctaccgggacctcatcagccatgacgagctgttctccgacatctacaagatccgggagatcgcggacgggctgtgcctggaggtggagggcaagatggtcagtagaacagagggtgccatcgatgattcactcattggtggaaatgcttccgctgaaggtccggagggcgaaggtaccgaaagcacagtagtcaccggtgttgacattgtcatgaaccatcacttacaagaaaccagcttcacaaaagaggcctacaaaaagtatatcaaagactacatgaaatcactcaagggcaaacttgaagaacagaaaccagaaagggtaaagccttttatgactggagctgcagagcaaattaagcacatccttgctaatttcaataactaccagttttttattggtgaaaacatgaatccagatggcatggttgctctactggactaccgtgaagatggtgtgactccattcatgattttctttaaggatggcttagagatggaaaaatgttaacaaattggatctatcgcctgtcaccataattggctgctgcttaccatccatacaacaccaggacttaggacaaatgggactgatatcatcttgagcttttattttgaccgtgatttatttggagtggaggcattgtttttttttttttttaaagaaaaaaaaacatgtcatgtgggttgtctaaaaataaagtgcatttaaattca

SEQ ID NO: 270 - DNA, 2104 bp, Rattus norvegicus
  Genbank Accession No. NM_053883
gcacgagacggggttggatctgaggtgcagcctcagagggattaggagctgctagacttttttcttttttcctttttctcctctcagtggcacggagtccgaattaattggatttcattcactgggtaggaacaaaactgggcactttcattcagagagattcattgactctgagagtgatctggtgcagagggaccaccggcttggcttctgtcgccttccctaaccgctagcttcggcttgggaaaggccgaatcaaacccggctccgagagccggagcttctcacggcttgcttggcctatgcctgcctcgaggggcgtctgctaggcaccccgccttctcctgcagctcgacccccatgatagatacgctcagacccgtgcccttcgcgtcggaaatggcgatcagcaagacggtggcgtggctcaacgagcagctggagctgggcaacgaacagctgctgctgatggactgccgaccgcaggagctgtacgagtcgtcgcacatcgaatctgccatcaacgtggccatcccgggcatcatgctgcggcgtctgcagaagggcaacctgccggtgcgcgcgctattcacgcgctgcgaggaccgggaccgctttaccaggcgctgcggcaccgacaccgtggtgctctacgacgagaacagcagcgactggaatgagaacacaggtggagagtcggtcctcgggctgctgctcaagaaactcaaagacgagggctgccgggcgttctaccttgaaggtggcttcagtaagttccaggccgagttcgccctgcactgcgagaccaatctagacggctcgtgcagcagcagctccccgcccttgccagtgctgggactcgggggcctgaggatcagctccgactcttcctcggacattgagtctgaccttgaccgagaccccaatagtgcaacggactccgatggcagcccgctgtccaacagccagccttccttcccggtggagattttgcccttcctttacctgggctgtgccaaggactctactaacttggacgtgttggaagagtttggcatcaagtacatcttgaacgtcacccccaatctgcccaatctgtttgagaatgcaggggagttcaagtacaagcaaattcctatctctgatcactggagccaaaacctgtcccagtttttccctgaggccatttctttcatagatgaagcccgaggcaaaaactgtggtgtcctggtgcattgcttggcgggcatcagccgctccgtcacggtgacagtggcttaccttatgcagaagctcaacttgtccatgaacgatgcttatgacattgtcaaaatgaagaagtccaacatctctcccaacttcaacttcatgggccagctgcttgactttgaaaggaccctgggactcagcagcccctgtgacaatcgtgtccccgcacagcagctctacttcaccgcgccctccaaccagaatgtctaccaagtggactccctgcaatctacgtgaaaggcacccacctttcctagccgggagtgtctcattccttcagtttctcttgggcagcatcgaccaggctgctttctttgtgtgtggccccaggtgtcaaaaatgtcaccagctgtctgtattagacaaggttgccaagtgcaaaattggttattacggagggagagatttgctccattcattgttttttggaaggacagggtatgctgtctagatccaggcaataggtttgcttttgtaccccagcctacccaagcagggactggacctccatccagatagagggtaggacaaaggagccggggataggagcatgtgttccttagggccacatatggctgtttcctgttgcatctggaaccaactatattgtcttcagtgaagactgattcaactttgcgtatagtggagccaaagagattttagctctgtatttgtggtatcggttttgaaaacaaaagaactgatcctttaatttgattattgtaaatatttgatcttcacttgagagtgtttgtttggcttgtgtttggtttttaatctttgggtttaaacgagatccaaagggagaaagagcagtatgcctcgtgccgaattc

SEQ ID NO: 271 - DNA, 6659 bp, Rattus norvegicus
  Genbank Accession No. NM_053885
  misc_feature (1)..(6659): n = a or c or g or t
gcacgagccccgcgctccgcagnctctagcccctccgggcctcggtccccgccttcttccccgcgcctcgtcccctcacgcgctccccaccttgtctccgcctcgttttctctcctggttgaagggaaggaaaaaaaaaaacatctaccatcctcctgtgggagcctctcgccctctggggaaaaaaaaaatccacaaaaccagacatggtcctgggntcccactgttgaaggtttggcccacccgaggaggtcgaagtcccggaagggaagccccgnagccccccggggtcgaatccccgggggccggttccctcggccccgggcccgccgccttcggtccgccgccggtccctgggggctcccacccggtcccctgcacttttccccggagcccggccgccacccctctcattgatggtgtagcgtctgaggggaagcatttttgaaacgttggggttgttggagtggttggattttccctggaattgagtaagaaattcagaagactgaagcccaggctcactgtctacctttcacggaggcctagccgtgagaggacagaagaaggcacgtggngaatcatgacagctgacaaagataaagacaaagacaaagagaaggaccgggaccgggaccgggaccgagagagagataaaagagacaaagctagggaggagcgagaacgccaggcctcggaggagctgcacgttggagggaggagccaagaactatgctgaaagtgacacagtgaggacgaagacaacgacaaacggagccaccacggaggagtccgccaggaagagcagaaagaaacctcccgaaaaaaaagtcccgcttacgagaggacagacactggggagataacgtcttacatcactgaggatgatgttgtttacagaccaggagactgcgtgtatatcgagagtcggcggccaaacacaccgtatttcatctgcagcatccaagacttcaaactggtccacaactcccaggcctgttgcagatctccagctcctgctttgtgtgatcccccagcatgctctctgccggtggcatcacagccaccacagcacctttctgaagccgggagagggcctgtagggagtaagagggaccatctactcatgaacgtcaaatggtactaccgccagtctgaagttccagattctgtctatcagcatttggttcaggaccggcataatgaaaacgactctggaagagaacttgtcatcacaggatccagtcatcaaggaaccgggagctcttcatttctgattatgttgacacctaccatgctgctgccctgagagggaagtgcaacatctcccatttttccgacatatttgctgctcgtgaatttaaagcccgagtggactcgtttttctacatattaggctacaaccctgagacaaggaggctgaatagtacccaaggagaaattcgagttggccctagccatcaggccaaacttccagatttgcagccatttccttctccagatggtgacactgtgactcagcatgaggaacttgtcttggatgcctggagtcaagtgacttgtgacctcctcatgtactttgagggcagcaaggagcatggcagccttccgcaggaattgttgttgacggaggttccacagaggatggcttgtgtcgcaggggtcttcgggattgacaacactctcaatgcactgaacacactacatgaaagcagttatgatgccggcaaagccctgcagcgcctggtgaagaagcctgtgcccaagctgatcgagaagtgctggacagaggatgaagtgaaacgcttcgttaaggggctccgacagtacggcaagaacttcttcagaatcagaaaggagctgcttcccaataaggaaaccggggaactgattaccttctattactactggaagaaaacaccggaggcagccagctcccgtgcccaccgccggcaccgcaggcaggctgtgttcagaagaattaagactcgcacagcgtccacccctgtcaacacgccctccagacctccttccagtggaattctgtaagtggggtatcttggcgctgccaagggtagtaagagactgcgcacatgcagacatatctgtgtccagctctaagcctgtgaactggtgagccagggatttgtatggtgtggtttgtgtgttagcgtgtacatgtttgtacattagtgctgacaaactgacaattgtgggagagtttaaaaattattcttacatttaagtatttctaataaatttcaccattctttcacattttgtaaaatataagcttgaccctccgctttcttcttttgtttgctttaccaagcttagcttcctagtcctagtgtgacattcattctaataaaacagggaggccctgtgggttttggcccctaccaactagactgaaacagtagtgctttacagttctgccccagccctgaacactgccctgaggcaccagtgttctgtgtttgctttgtgcgggccagcagccatctaggttcataagagactcccaggccgcgcagatggacgagggcagacagtcctgtgggtgcacggctaccaccccagactcaccggactcacccgtgctggccaccccaggactccagcatgacatcagcctcctggcagggcaggagcttgagtactacccctcacacatgcaagctctttgctctggtgacagcgcctgaggaattagaaatgggcctttgtgacagatgctcattcagtctgtgtggttagttcactgctggtcgcactcccagcggaacatgatggcgtctcttctgtttccacttttgctcaccttgtacagtggatctgagttcggctagtgaggatgactttgacagtgaggacagcgagcaggagctgaaggggtacgcctgccggcactgcttcaccaccacctccaaagactggcaccacgggggccgagaaaacatcctgctgtgcacagactgccgcatccacttcaagaagtacggtgagctgccacccatcgagaagcccgtggaccccccgcccttcatgttcaagcctgtcaaggaggaggacgatgggctcagtgggaagcatagcatgaggactcggcggagtcggggctcgatgtctacactccgcagtggtcggaagaagcagcctgccagtcctgatggccgcgcctcacctgtcaatgaggacgtgcgatccagtggccggaactcccccagcgctgccagcacttccagcaatgacagcaaagcagaggctgtgaagaagtcggccaagaaagtgaaggaagaggctgcgtcccctctgaagaacaccaagcgccagcgggagaaggtggcctccgacacagaagacactgacagggccacctccaaaaagacaaagacccaggagatcagccgccctaactctccctctgaaggtgagggggagagttccgacagtcgcagtgtcaatgatgagggcagcagtgacccaaaagacatcgaccaggataatcgcagcacgtcccccagtatccccagccctcaagataatgagagcgactcggactcatcagcacagcagcagatgttgcagacccagcctccagccttgcaagctcccagtggggctgcctctgctccctccacagcccctccagggacaacccagcttcccaccccagggcctacaccctctgctactacagtccctccacagggctcccctgcaacctcacagccccctaaccagactcagtctacagtggcacctgcagcccacaccctcatccagcagacgcccaccctgcatccccctcggctgccctcacctcatcctccactgcagcctatgactgcaccacctagccagaactctgcacaacctcacccccagccctccttgcatggtcagggccctcctggccctcacagcctacagactggacccctactacagcacccaggacctcctcagccctttggactgactccccagtcctcccaaggtcagggccctctgggtccctccccagcagcagcccatcctcacagcaccatacagcttccagcctctcagtcggcactgcagcctcaacagcccccaagggaacagcccttgcctcctgccccgttagccatgcctcacatcaaacccccacccaccacaccaattccccagcttccagcaccacaggcccacaaacatccgcctcacctctcaggcccctcccccttctcaatgaatgccaatctgccacccccaccagccctgaagcccctcagctcactgtccacacaccatcctccctcagcccaccctccacccctacagcttatgcctcagagccagcccttgccctcttcacccgcccagccccctgggctgacccagagtcagagcctcccaccccctgctgcctcccaccctaccactggcggcctccaccaggtgccctcgcaatccccattcccccagcacccttttgtacctggaggcccccctcccatcaccccaccctcctgcccccccacttccacccctcctgcggggcccagctcctcatcacagccaccctgctctgctgctgtgtcttctggaggcaatgttccaggggcgccatcttgcccactccctgctgtgcagatcaaggaagaggctctggatgaagccgaggagccagagagccctcctccaccccccaggagcccatcccctgagcctactgtagtggacacccccagccatgctagccagtctgccaggttctacaaacacctggaccggggctacaactcgtgtgcacggacagacctgtacttcatgcctctggctggatccaaactagccaagaagagggaggaggccattgagaaggccaagcgggaggctgaacagaaagcccgagaggaacgagagcgagagaaagagaaggaaaaagagcgagagcgggagagagagcgggaacgggaagcagagcgcgctgctcagaaggcttctagctcagcacatgaaggccgtcttagtgaccctcagctcagtggtccaggtcacatgcgaccctccttcgagccaccaccgaccacaattgctgctgtgcccccatatattgggcctgacacacctgccctccggacactgagcgaatatgctcggccacatgtcatgtctcccaccaaccgtaaccaccccttctacatgcccctcaatcccaccgaccccctcctggcctaccacatgcctggcctgtacaatgttgaccccaccatccgggagcgggagctccgagaacgtgagatcagagagcgcgagatccgggagcgggaattgcgggagaggatgaagccaggctttgaggtgaagcccccagagctggaccccctgcacccagccaccaaccccatggagcattttgcccggcacagcgccctcaccatccctcctgcagctggcccccacccctttgcctctttccacccgggcctcaaccctttggagcgggagagactggcgctagcaggtcctcagctgcggcctgagatgagttacccagacagactggcagctgagcgcatccatgccgagcgtatggcgtcactcaccagcgaccccctggcacgactgcagatgttcaatgttactccacaccaccaccagcattcacacatccactcccacctccacctccaccagcaggatcctctccaccaaggttcagcaggcccagttcaccccctggttgaccccctgactgctggccctcacttagctcgcttcccctaccctccgggcaccctccccaatcctctacttggacagcccccccacgagcacgagatgctacgccacccagtttttggcaccccctacccccgagacctgcctggggctattccaccccccatgtcagcggcccaccagcttcaggccatgcatgcccagtcagcagagctgcagagactagccatggagcagcagtggctgcatggacatccacacatgcatggtggccatctacccagtcaggaggattattacagtcgactgaagaaggaaggagacaagcagttataagttatttatttgttatgctgctgtggaaaccccagttctagggggcagaaacaggacttttacatctagtaggcgctgcaagagcaaagaggaatatcgtctaaagatttctctatatttaaacccacaactaaaaacacatctgcatagtagtgtttgtttgttgagaggatttcctgagaccagttgaggtctccctgcatgacagtcccccagaaacggcgtgtcctgggctggactgacacccagaaaacgtacctgcgatcttggggtttggctttagttctcttttccttgatttctcagtaggtgctagagtccgttcacacccttcactgtgcgcgcagacactgaggcacgtgggctctggaacccacggggtttgcaaagaggcggcgtatgagtttgaaatccaagagctataatttttaaaaaatcttttattttactacattgtaggaaatcttcataatttgagacagttctgcagcatggctttttacatctgtaaataaataattttagaagtctttttttctgtccacagacgactattctgatctattttttccagccatgtcacaaagtgt

SEQ ID NO: 272 - DNA, 3889 bp, Rattus norvegicus
  Genbank Accession No. NM_053949
atgccggtgcggaggggccacgtcgcgccgcagaacaccttcctcgacaccatcatccgcaagtttgagggccagagccgcaagttcatcatcgctaacgctcgtgtagagaactgcgccgtcatctactgcaacgacggcttctgcgaactgtgcggctactctcgggccgaggtgatgcagcggccctgcacctgcgatttcctgcatgggccgcgcacgcagcgccgtgccgccgcgcagatcgcgcaggccctgctgggcgcggaggagcgcaaagtggagatcgccttctaccggaaagatgggagctgcttcctgtgtttggtggatgtggtgcccgtgaagaatgaggatggggctgtcatcatgtttatcctcaactttgaagtggtgatggagaaggacatggtagggtcgccagctcatgacaccaatcacagggggccctctaccagctggctagcttctggccgggccaagaccttccgcctgaagctgcctgccttgttggcactgactgccagggaatcgcccatgcggacaggaagcacgggcagtcctggagcccccggggcagtggtggtggatgtggacctgacgccggcagcacccagcagtgagtccctggccttggatgaggtttctgccatggacaaccatgtggctggacttgggcctgcagaagagaggcgagcactggtgggcccagcgtctgcttcaccggtagccagcatcccaggccctcacccgtcccctcgagctcagagccttaaccctgacgcctctggttccagctgcagtctggcccgaacacgctcacgggagagctgcgctagtgtgcgccgggcgtcttccgcagatgacatcgaggcaatgcgggctggggcgctgcccctcccgccccgacatgctagtacaggggccatgcaccccctgcgcagtggcctgcttaactccacctcagactctgacctcgtgcgctaccgaaccattagcaagataccccaaatcaccctcaactttgtggacctcaaaggcgaccctttcctggcttcacccaccagtgaccgggaaatcatagcacccaagataaaagagcggacccacaatgtcaccgagaaggtcacccaggtcctgtccttgggagccgatgtgcttcctgaatataagctgcaggccccaagaatacaccgctggaccatcctacactacagccccttcaaggcagtgtgggactggctcattctgctgctggtcatctacacagccgtcttcacaccgtactcggctgccttcctgctgaaggagactgaagatgggtcccaagcccctgactgcggctatgcctgccagcctctggctgtagtggacctcctcgtggacatcatgttcattgtggacatccttatcaatttccgcaccacctacgttaacgccaatgaagaggtggtcagccatcctggccgcatcgctgtgcactacttcaagggctggttcctcatcgacatggtggctgccatccccttcgacctgctcatctttggctctggctctgaggagctcatcggactgctgaaaactgccaggctgctgcggctggtgcgagtggctcggaagctggaccgctactcggagtatggggcagcagtgctcttcctgctcatgtgcaccttcgcgctcattgcacactggttggcctgcatctggtacgccatcggcaacatggaacagcctcacatggactcacacattggctggctgcacaacttgggcgaccagatcggcaagccctacaacagcagcggcctgggaggcccctccatcaaggacaagtacgtcacagcgctctacttcaccttcagcagcctcaccagcgtgggctttggcaatgtctctcccaacaccaactcagaaaagatcttctccatctgtgtcatgctcattggctccctcatgtatgccagcatcttcggcaacgtgtccgccatcatccagcggctgtactcgggcacggcccgctaccacacacagatgctccgggtgcgggagtttatccgcttccatcagattcccaacccgctacgccagcgcctcgaggagtacttccagcacgcttggtcctacaccaacggcatcgacatgaatgcggtgctgaagggtttccccgagtgcctgcaggctgacatctgcctacatctaaaccgctcactgctgcagcactgcaaaccattccgaggggccactaaaggctgcctgagggccctggccatgaaattcaagaccacacatgcgccaccaggggacacgctggtgcacgctggggacctgcttactgccctctacttcatctccaggggctccatcgagatcctgcggggtgatgtcgtggtggccatcttggggaagaacgacatctttggagagcctctgaacctgtatgcacgtcctgggaagtccaatggggatgtgagggccctcacttactgtgacctgcacaagatccatcgagacgatctgctggaggtgttggacatgtaccccgagttctcagaccacttttggtctagcctggagatcaccttcaaccttcgagataccaacatgattcctggctcccccagcagtgcggaactagagagcggcttcaacaggcagcgaaagcgcaaactgtccttccgcaggcgtactgacaaggacacagagcagccaggggaggtgtcagccctggggcaaggccctgcccgagttgggccagggccgagttgccggggacagccgggagggccatggggggagagcccatccagtggcccttccagcccagagagcagtgaggatgagggcccaggtcgcagctccagccccctccgcctggtgcccttctccagccccaggcctcccggagactccccaggtggggagcctttgacagaggatggagagaaaagcagtgacacttgtaatcccctgtcaggtgccttctctggggtgtccaatattttcagcttctggggggacagtcgggggcgccagtaccaggagctgcctcgatgccctgccccggcccctagcctcctcaacatccccttgtctagccctggccggcgttcccggggtgacgtggagagcaggctggatgcactccagagacagctgaacaggctggaaacccggctaagtgcagacatggccactgtcctacagctgctacagaggcaaatgaccctggtccctcctgcctacagtgctgtgaccacccctgggcctggccccacttccacgtcccctttgttgcctgtcggccccgtccccactctcaccctggactcgctttctcaggtttcccagttcgtggcgtttgaggagcttcctgcaggagccccagagctcccccaagatggccccactcgacgcctctccctgccgggccagctgggggccctcacctcccagcccctgcacagacatggctcagatccaggcagttagtgacgctgcccggtgtggacacgtggctcaccctggggtcaggggattacctgaccgctctccttggagaccctggtttgaaggggagaacagtgcaggagcacctcctcccccgcccttgggaccagcatctcctcctgcaataccctgggccccactgggaggggcaggggcagagctgggcagtggacagggggtctgtggtccccccactgccctgggggcattagctggtctaactgcccggaggcacccggccctgggccttaggcacctcaaggacttttctgctatttactgctcttattgttaaggataataattaaggatcatatgaataattaatgaagatgctgatgactatgaataataaataattatcctgaggaaaaaaaaa

SEQ ID NO: 273 - DNA, 4529 bp, Rattus norvegicus
  Genbank Accession No. NM_053961
aagcttcttgatttcacttttcttcagtcacaaacttgaggatggagctttaagagtatacacatggcctactattcggctatcacccaggcccagcttaggctctttttaaaaaaaagtcatttttttttaagatttatttattttatgtctatgagtacactgtagctgtcttcagacacaccagaagagggcatcagatctcattacagatggttgtgagccaccatgtggttgctgggaattgaactcaggacctctggaagagtagttgggtgctcttaaccgctgagccatctctccagccccccctttttttaaaaatatatttattgtatatatgtgagcacactgttaccatattcagacacaccagaagagggcatctgatcccttacagatggtcgtgagccaccatgtggatgctggggattgaactcaggacctctggaagagcaaccagtgttcttaaccactgaaccatctctccagtccatctgtatggctttcttttttttggttctttttttttttttcggagctggggaccaaacccagggccttgcgcttcctaggcaagcgctctaccactgagctaaatccccaaccccctgtatggctttcttaattgccagattttaacttcttctctcacctcctctaactactgcaatagatactcaactgcgctcagcctcagtcttctcccttctgatgcattctcttcattcattatccttttttatagtgagaaaaggttgctctataaagtccaggctgacctgagactaaattggccgtgctggcttcccattcacagagacccaccggcctcagctgagtgctggggtcaaaggctctagccatcatgcccagctgcaatgtcttttcttaaagggacatcaggcccgctggattggggcctgcctgtaggaggtcacttagctttaattatttctctaattactacaattatctctctaaatgcaattgtagtgcatctgaggcacgtgatttaatctgtgttatcccaaagtcctcttcaggtttcctcaggtctccagtgctctccttcccaggaaggcttggaactaaagccacatcatggtttttttgttttttttttctttttttcggagctgagctggggaccgaacccagggccttgcacttcctaggcaagcgctctaccactgagctaaatccccaaccccccacatcatgtttacgtgatgttttcatccacgaatctgagaaaacgctccacttaaagcctctggtggctgtaaaccccttgagactagtgagtctttatcttaccctcctgagtttgcctttacatagcttcatagagctcagcatgcttaaccatatcctgtttcccgttgcttcacaaatgttccctacctttcaaagtcatggctccccaactacctgggtacctcgatgacacgagtaagcaggactgactcgtaatacaggatcttcaaaggtggaaagccatgagatgggagtgaagattttaacacttaactgggtagatgggagccctggagaccacactcacaactcaaaaaggtaaggaggacatacaggtcttttttgggacatagccatgtgacactgtgacagaatgaccagtgtgtcatacttgcacagcctgtgtagaggtcaaggtcagtatggctggtcaaatggagggcagctagctgcctattagaggggcggtcattaggcgacaactgtaaaaagcacagctgaaggactgatcgctcctagggatggtggaggaggaattttattgtagataaaagggagagagcatagtcagagcaaagacggctgggagagtcagaggggcagcctgggttaagacactgacgaagagagtgccatagctaaaatggctggattatataaggaaaggcagctggacgaagggcagtccagaccttgggttggggaagtttagggtggggagcagggcatgcctgccataccctgaaggattctgggaaaacctcatggccaggtccactttgatgttagtcacctcagtttgtcccagggtttcagacttaacagtaataagaaagatagaaagtgcccgacataatccagctttggtttcatgattctacaggtgtgtgtgtgtgtgtgtgtgtgtgtgtgtgtgtgtgtgtgtgtgtgggtgtgtgtgtgcgtgcatatagaggtcactgattaagctcaatttggtgatcttcctcgcttccccagtactggcaagaattccacacccagctttttatgttttgtttttgtcattttgagacccaggttgactctgaagggcctagacctcactctgtagaccaggttggccttgaactcaggttcaccagccttggacttaggagtggtaagatgtgcttttcccttgggtgctgaggatgggacttatatgtgatgtgtacgagtcctggaacagggtatgtggatcagattttgatcagcctgccagttttccagtgagcactgggattgaaggcctgtgctgcctcacacagcctgctagctatgatccctgtgtcttctccagtgaggaattcattccttcgagcctttatcactgtgctgacttcccacgggaacaatcatcacgtggcatgagctactccctgaaaacggaacagcccagcctggtcttgtcaccctcctgccttgtgctgaaattaggcctgtaggcctgtgccacctactatacctgaccaaaagtagaatggcgaataggccttttcccaaccttctggggcaggggtggccccattgcctaagtgccccgcgggcctgtccagcgctgcaccctgtgacctacaagggcttggcagcgactaccagtgacaaacagctgactaaccgggggaagcgacgggtctcaacggacctcatgacagcccagcgcagagaaggcagggacgccgccacgtcttgttccaaggcgagagagggcaacgagggaattgttgaggctgcgcctcgcgcctctcctcacgcgagaacgccgcgaaacccagcctagacgagtggcacggagtgcgcgtgcgcgacagtcccacttcgcaggcccttccgtcacgtggccccagcccacctccccccacctcccccccaccgtgcccccgcttctctcactacacatgcgcagccgcccctctctgccccgcccctctgcggccggtctcttccaccctagaggccgcctgagcctctccgagtggccacgtgcgctcatgcgcgccggcgggacggccctcccagtgacgtgaccgcccactcggagcgctcctgctgtagcttgcccatctcccgctcccacaatccggcgtgatggctgccgccgttcctggcgccgtttcgctctccccactgctgtccgttctccttggcctgctgctcctctctgctcctcatggcgccagcggcctgcacacgaagggcgcccttcccttggacacagtcactttctacaaggtcattcccaaaagcaagttcgtcttggtgaagttcgacacccagtacccctatggagagaagcaagatgagtttaagcgtctggctgagaactcagcctccagcgatgatctcttggtggcagaggtggggatctcagactatggtgacaagctgaacatggagctgagtgagaagtacaagctggacaaagagagctacccagtcttctacctcttccgggatggggactttgagaatcctgtcccatacagcggggcagttaaagttggagccatccagcgctggctcaaggggcagggagtctatctgggcatgcctggatgtctgcctgcgtacgatgccctggcgggccagttcatcgaggcctccagcagagaggcccgccaggccatcctgaaacaggggcaggatggcctctcaggtgtgaaggagacagacaagaagtgggccagtcagtacctgaagatcatggggaagatcttggaccaaggtgaagacttcccggcctccgagctggcccggatcagtaagctcattgagaacaagatgagtgagggtaagaaggaagagctgcagaggagcctcaacatcctcaccgccttccgcaagaaaggcgccgagaaggaggagctgtgagggcaccaggctgctagggtttgctgagggcggggagggagagccgcctgctgactgtggggccctgtgggtggagggggcagtggagcaaagcagtcctgagccagagacctgtgccccgagtgcctggacactgaggctgctgagaccataccctggacatccttggagcagtttgtggggagcctgtgtgccaagacaagatggctgtgtcccacaggagctggtactatagaggaaggtccttgacaggtatagttctgatcaaataaaagtctgttttggttagatgattttcttctcagatagtactttttggcccctgtcaagagtctgagctgttgtgcattctattctgccaagacttgcctgcgtaa

SEQ ID NO: 274 - DNA, 1231 bp, Rattus norvegicus
  Genbank Accession No. NM_053965
acagcgacgaagatcaagactgccaggagctgcaagtagactgacagaagactgaccatggcagaggagccgaaacccatcagtccgcttaagaacctccttgccggcggctttggcggcgtgtgcctggtgtttgtggggcaccccttggacacggtcaaggtccgactgcagacacaaccaccaagtttgcctgggcagccacctatgtactctgggaccatcgactgtttccggaagactctttttagagagggcatcacagggctgtatcggggcatggctgcacccatcattggagtcacccctatgtttgcggtgtgcttctttgggtttggtttgggaaagagactacagcagaaatctccagaggatgaacttacctacccgcagctgtttacagctgggatgttatctggtgtgttcaccacaggaatcatgacccctggagaacggatcaaatgcttactgcagattcaggcttcttcagggaaaaacaaatacagtggtaccttggactgtgcaaagaagctgtatcaggagtttgggatccgtggcttctacaaagggactgcgctcactctcatgcgagatgttcctgccagtgggatgtatttcatgacatacgaatggcttaaaaatctcttcactccacagggaaagagtgtccatgacctcagtgtgcctcgggtcctggtggctggcggctttcgagggatcttcaattgggttgtggcaatccccccagacgtgctcaagtctcgattccagaccgcacctcctggaaaatatcctaatggtttcagagatgtgttgagagagctgatccgagaagaaggagtcacctccttgtacaaagggttcaatgcagtcatgatccgagccttcccagccaatgctgcctgtttccttggctttgaaattccgatgaagatcctcaattggattgcccccaacttgtgaggctgaagacatgttgaagacctttggatgctggaagactgttgccgagaagcaggggcaggactgggaagaccctgagggtgaggggagggaagtggtgtgatcagagccccaggcatgactgtgatggtgaaactgttgccttaatgacatcctctaccttatgtaacttggtgccattttgaaacttgaatatagaaggtttccagagaattggagatggaataaatagtttatagactcgtcaaaaaaaaaaaaaaaaaaaaaa

SEQ ID NO: 275 - DNA, 449 bp, Rattus norvegicus
  Genbank Accession No. NM_053982
accgtcaccatggtgcgaatgaatgttctggcagatgctctcaagagcatcaacaacgcggagaagaggggcaaacgccaggtcctcatcaggccgtgttccaaagtcatcgttcggttcctaactgtgatgatgaagcatggctacattggtgaattcgagatcattgatgatcacagagctgggaagattgttgtgaacctcacaggaaggttgaacaagtgtggagttataagccctagatttgatgttcaactcaaagacctagagaagtggcagaacaatctgctcccatcacggcagtttggtttcattgtgctgacgacctcggctggcatcatggaccatgaagaggcaagacgaaaacatacaggagggaaaatcctgggattctttttttaaatgtaaagcataaataaaaagcctctgtggactgtgaaaaaaaaaaa

SEQ ID NO: 276 - DNA, 1107 bp, Rattus norvegicus
  Genbank Accession No. NM_053985
agcggtttggtcgttcgttggaggagcttcgtcttgttctgctctgcgattgcggcgcttgttcgagcgcttacagcggcgcgtcggtcccagcaagggcctcagacttcagctttgggtgagagaagatggcccgaaccaagcagaccgctaggaagtccaccggagggaaagccccccgcaaacagctggccaccaaggcggcccggaaaagcgcgccctctactggcggggtgaagaaacctcatcgctacaggcccgggaccgtggctctaagagagatccgtcgttaccagaaatcgactgagctgctcatccggaagctacccttccagaggttggtgagggagatcgcccaggatttcaaaaccgacttgaggtttcaaagtgcagccatcggtgcccttcaggaggctagcgaggcatacctggtggggttgtttgaagataccaatctgtgtgccatccacgccaagagagtcaccatcatgcccaaagacatccagttggctcgccggatacggggggagagagcttaagttgaagcgatttttatggcattttgtagtaaattctgtaaaatactttggtttaatttgtgactttttttgtaagaaattgtttataatatgttgcatttgtacttaagtcattccatctttcactcaggatgaatggaaagagtgactgttcacagacctcagtgatgtgagcactgtggctcaggagtgacaagttgctaatatgcagaagggatgggtgatacttcttgcttctcatgatgcatgtttctgtatgttaatgacttgttgggtagctattaaggtactagaattgataaatgtgtacagggtccttttgcaataaaactggttatgacttgatccaagtgtttaaccatacatcactgtgatagaatgtgggctttttcaaaggttgaagatacaagttttagccacagtgtaacagtttcctttaaaaaaaaaaaagtaaacctggcagctatagaatacactatgtgcatttataatagctattttatatattgtagtgttcaacatttttaaattaaatgttttacattcacaaaaaaaaaaaaaaaaaaaa

SEQ ID NO: 277 - DNA, 1420 bp, Rattus norvegicus
  Genbank Accession No. NM_053995
ccctcaatagccacactatttattttatttcaattaaaaatttcttcccaaacctttcctgcacctccctcacccaaaactataaactcggtgccatgatgctggccgcccgtctttccagacccctgtcacagctcccaggaaaagctctaagtgtctgtgatagagaaaatgggacaagacacacactgttgttttacccagcttctttcagccctgacacccgtcggacctacaccagccaggcagatgcggctagtggcaaagctgtcctggttacaggctgtgactctggatttgggttctctttggccaagcatctacactcaaaaggtttccttgtatttgccggatgtttgttgaaggaacaaggcgatgctggggtcagggagctggacagcctgaagagtgaccggctgagaaccatccagctcaatgtctgcaacagtgaggaggtggagaaagcggtggagaccgtccgctccggcctgaaggatcctgagaagggaatgtggggcctggttaacaacgcaggcatctcaacgtttggggaggtggagttcactagcatggagacgtataaggaggtggccgaagtgaacctctggggaactgtgcgcacaacaaaatccttccttccccttctccgaagagccaaaggccgtgttgttaacatcagcagcatgctgggtcgcatggccaacccagcccgctcaccatactgcatcaccaagtttggggtagaggctttctcggactgcctacgctatgagatgcaccctctgggtgtgaaggtcagtgtggtggagcctggcaacttcatagctgccaccagcctctatagccctgagcgtatccaggccattgccaagaagatgtgggatgagctgccagaggtcgtccgcaaagactatggcaagaagtacttcgatgaaaagattgccaagatggagacctactgcaacagcggttccaccgatacgtcctccgtcatcaacgctgtcacccatgccctgactgctgccaccccttatacccgctaccatcccatggactactactggtggctgcggatgcaggtcatgacccattttcctggagccatctctgacaagatctacatacactgaagagctgaagaggtccctgcagcctctgccagggagcctgatgggagggagttcatacagttatcttttgattaaccattgtgggttgtccactgtcttaggaagacctattttaaccttacgtgttcaatgtggtgaatggtttgggccttcacaaatacagggcactggtgggtggccctaaccctcaaggccaatatggtgcttctatctgtctatctagagttgattttatataaagatttgtgggaaatacctttatattaaagacgttattagaatagaaaaaa

SEQ ID NO: 278 - DNA, 889 bp, Rattus norvegicus
  Genbank Accession No. NM_054008
tgaacacccgagcggaccgcagtgcaggcggcagccaccagggccaacacctctcagcatctctactacacgtgtcactgagcaacctctccatgaagccgccctccacgcagagcagccccgcggccgtggcggccgcagccccggccatggactccgcggccgctgcagacctgacggacgtgctgtgcgagttcgacgcggtgctggccgacttcgcgtcgcccttccacgagcgccacttccactatgaggagcacctggagcgcatgaagcggcgcagcagcgccagcgtcagtgacagcagcggcttcagcgactccgagagtgcagactcgttgtacagggacagcttcaccttcagtgatgagaagctgaattctccgacggactccactccagccctcttgtcctccgctgtcactcctcggaaagccaaattaggtgacactaaagagctcgaagacttcatcgctgatctggacagaaccttagcaagtatgtgaagcaaggagtttgagattcttatgccacaagagtgaaactccagaaggctacgccaggccctggcaaaatcggctactaagtctgctgtgggagcgggcagagctcgcggcatccggccgttcttggttcgccataactttagccattgggtccatctctgggcagttcagataatgaggctgactttgtttacctgcctgcaccatattcaacagatgatctatctaatgtgtttttactccttaaacatagctcttctataaattaaagtgcttttatggaaatatttgtaattacttatatatagttggaggtcataataagctttcccatcataatatatttttgtatacaaataaaatttaaactgggatctgtacct

SEQ ID NO: 279 - DNA, 5236 bp, Rattus norvegicus
  Genbank Accession No. NM_057103
cgggccggcgggagtagaagagccactgagccatgggcgcaggcagttccaccgagcagcggagccccgagcagccggcggggagcgacacgccgagcgagctggtgctcagtggccatgggcccgcagctgaagcctcgggagcagctggagaccccgccgacgcggaccccgccaccaagctcccacagaagaatggccagctgtcttctgtcaacggcgtagctgaacaaggagatgtccatgtccaagaggaaaaccaggaggggcaggaggaagaagtcgttgatgaggatgttggacagcgagagtcagaagatgtgagagaaaaagaccgagttgaagaaatggcggccaactccacagctgttgaagatatcacaaaggatgggcaggaggagacatcagaaataattgaacagatccctgcttcagaaaacaatgtggaagaaatggtacagcctgctgagtcccaggctaatgatgttggcttcaagaaagtatttaaatttgttggttttaaattcacggtgaagaaggataaaaatgaaaagtcagatactgtccaactactcactgtcaagaaggatgaaggcgaaggggcagaagcctctgtcggagctggagaccaccaggagcccagtgtggagactgccgtcggagagtcagcatccaaagaaagtgagctgaagcaatccacagagaagcaagaaggcaccctgaagcaagaacagagcagcacagaaatcccccttcaagccgaatctgatcaagcggctgaggaagaagccaaagatgaaggagaagaaaaacaagagaaagagcccaccaagtccccagaatccccgagcagcccagtcaacagtgagacaacatcttccttcaagaagttcttcactcacggttgggccggctggcgcaagaagaccagcttcaagaaatcaaaagaggatgatctggaaactgccgagaagagaaaggagcaagaggcagaaaaagtagacgaggaagaaaaggaaaagacagagccagcctcggaggagcaggagccggcagaagacacagaccaggccaggttgtcagcagactacgagaaggtggagctgcctttggaagaccaggttggtgacctggaggcatcgtcagaggagaagtgtgctcctttggcaacggaagtgtttgatgagaagatggaagcccaccaagaagttgttgcagaggtccacgtgagcaccgtggagaagacagaggaggagcagggaggaggaggagaggctgaagggggcgtggtggtagaaggaacaggagaatccttgccccctgagaaactggctgagccccaggaggtcccccaggaagctgagcctgctgaggagctgatgaagagcagagagatgtgtgtctctggaggagaccacactcaactgacagacctaagtcctgaagagaagacgctgcccaaacacccagaaggcattgtcagtgaggtggagatgctgtcctctcaggaaagaatcaaggtacagggaagtcccttgaagaaactcttcagtagctcaggcttaaagaagctgtctgggaagaagcagaaggggaaacgaggaggtgggggagacgaagagcctggagaataccaacacattcacaccgaatccccagagagtgctgatgagcagaagggagagagctctgcgtcgtcccccgaggagcctgaggagaccacgtgtctggagaaagggccgctggaagcaccccaggatggggaagctgaggaaggaactacttccgatggagagaagaagagagaagggatcactccctgggcatccttcaaaaagatggtgacacccaagaaacgggtccgaagaccttctgagagtgacaaggaggaagagctggagaaggtcaagagcgccaccttgtcctccactgatagcacagtgtcagaaatgcaagatgaagtcaaaactgttggtgaggaacaaaagccagaggaaccaaagcgtagggtggatacttcagtgtcttgggaagcactgatttgtgtcggatcatccaagaagagagcaaggaaggcatcctcttcagatgatgaaggagggccaaggacactgggaggggacagtcacagagcagaggaggccagcaaagacaaagaagccggaacagacgctgttcctgccagcacccaggagcaggaccaagcgcaaggaagttcctcacccgagccagcgggaagcccttccgaaggggaaggtgtctccacttgggagtcatttaaaagattagtcactccaagaaaaaaatccaagtcaaaactggaagagaaagccgaagactctagtgtagagcagttgtccactgagatcgaaccgagtagagaagaatcttgggtttccattaagaaattcatccccggacggcggaagaaaagggcagatgggaagcaagaacaagccactgtggaagactcagggccagtggagataaatgaggacgaccctgatgtcccagccgtcgtgcctctgtctgagtatgatgcagtggagagggagaagatggaagcccaggggaatgcggagctgccccagctgctgggggctgtgtacgtgtccgaggagctcagtaagactctggtccacactgtgagtgtcgcagtcattgatgggaccagggcagtcaccagtgtcgaagagcggtctccttcgtggatatccgcttccgtaacagaacctcttgaacacacagcgggagaagccatgccacctgttgaagaggtcactgaaaaagacatcattgcagaagaaactcctgtgctcacccagacgttaccagagggtaaagatgcccatgacgacatggtcaccagtgaagtggatttcacctcagaagctgtgacagccacagagacctcagaggctctccgtactgaagaagttaccgaagcatcgggggccgaagagaccacagacatggtgtccgcagtttcccagctgactgactccccagacaccacagaggaagccaccccagttcaggaggtagagagtggtgtgctagatacagaagaagaggagcgccagacgcaggccatcctccaagccgttgcagacaaggtgaaagaggagtcccaggtgcctgcaacccagactgtgcagagaacggggtcaaaagcactggagaaggttgaggaggtagaggaggactccgaagtgctggcttcggagaaagagaaggacgttatgccgaaaggacccgtgcaggaagctggagctgagcatcttgcacagggctctgagactggacaggctactccagagagccttgaagttcctgaagtcacggcagatgtagaccatgtcgccacgtgccaggttatcaagctccagcagctgatggaacaggccgtggcccctgagtcatccgaaaccttgacagacagtgagacaaatggaagcactcccttagcagattcagacactgcagatgggacacagcaagatgaaaccattgacagccaggacagtaaagccactgcagctgtcaggcagtcacaggtcacagaagaagaggcggctactgctcagaaagaggagccttcgacactacctaataatgttccagcccaggaagaacatggggaagaaccaggaagagatgttcttgaacctacacagcaagagcttactgctgcagccgtgcccgttctggcaaagactgaggtgggtcaagagggtgaggttgactggttggatggagaaaaagtcaaagaagaacaggaggtgtttgtacactctggacccaacagtcaaaaggctgctgatgtgacatatgacagtgaagtgatgggagtggccgggtgtcaggaaaaggagagtactgaagtgcagagtcttagcctggaggagggagagatggaaactgacgttgaaaaggagaaaagggagacaaagccagagcaagtgagtgaagaaggtgagcaggaaacagccgctcctgagcatgaaggaacctacgggaagccagtcctgacacttgacatgcccagctcagagagggggaaggcactgggaagccttggaggaagcccttctctcccagaccaagacaaagcaggttgcatagaggttcaagttcaaagcctggacacaacagtcactcaaacagcagaagctgtggaaaaggtcatagaaacggttgtgatttcagagacaggtgaaagtccagagtgtgtaggtgcacacttattaccagctgagaagtcctctgcaacgggtggccactggactcttcagcatgcagaggacacggtacccctggggcctgagtctcaggcagaatccatcccaatcatagtaactcctgctcctgaaagcaccctacatcctgacctacaaggagaaataagcgcatcccagagagagcgatcagaggaagaggacaagccagatgctggtcctgatgctgacggcaaggagagtacagcaatcgaaaaagtcctcaaggctgaacctgagatcctggaacttgagagtaagagcaacaagattgtgctgaacgtcattcagacagccgttgaccagttcgcacgtacagaaacagcccccgaaactcatgcttatgattcacagacccaggttcctgcaatgcaggctgacagcagggagcccaacagatgctggacaaaaatgaaagttgccaagatgaaacacccagtgccgcagcccagagaggacttgcaagtcctgaccgttctggaggcatgggctcagcctcggaaatgcttgccgcgcttgcagttgaaagcgccggtgtcaaagtaagcattgagaagctgcctcctcaacccaaagatcaaaaggagcatgctgctgatggccctcagctccaaagcttagcccaggcagaggccagtgcctctggaaacctaaccaaagaatccccagacaccaacggaccaaagctaaccgaggagggcgatcgcccaaaagttgaggtccaggaagaagaaatgtctaccaagtcagtcaaagagaacaaggcccaggcagaagaggacctgcaggagccaaagggagacctggcagaatcctaagatgttagttgctcattgtacatctgtaagaccagaatgtgaaaacaagtcacagaacaagatgctgctgttgggaccttgagaccaagatttcagagcccatgagatccagagagcagggccgtccaatgatttccaccc

SEQ ID NO: 280 - DNA, 1111 bp, Rattus norvegicus
  Genbank Accession No. NM_057133
agagccaggaagaaacaggaacaagacacagaccatgagctccagccaatcaggggtctgcccatgccagggctctgcaagccaccccaccattctctacacacttctaagccccggtcccaggaccaggcccatggcacccgcatctcgcagccactgcctgtgccagcaacaccggcctgtgcgcctgtgtgctccacaccgcacctgcagggaggccttggatgtcctaggcaagactgtagccttcctcaggaacctgccgtccttctgcctcctgccccatgaggatcagcgacggctgctagagggctgctggggccctctcttcctgcttgggttggcccaggatactgtgacctttgaggtggccgaggctccggtccccagcatacttaaaaagatcttgctagaggaacccaacagtggtgcccagggtgcccagccaccagacccaccacaaccctcactggctgccgtgcagtggctgcagcactgcctggagtctttctggagccttgagctgggtcccaaggagtacgcatacctgaaaggcactatcctcttcaacccagatgtgccaggcctccatgcctcctgccacattgcacacctgcaacaggaggctcactgggcattgtgtgaagtcctggagccctggtacccagctagccaaggccgcctggcccgaatcctcctcatggcttccaccctcaagaacatctcctgtacccttctggtagatctcttcttccgccctgtcatcggagatgttgacatcactgaactgcttgaagacatgcttttgttgaggtgacctgtagaatggggtccggtgcctccaaaggggagcctgaaaggccgcactcagctcccctggagcagccctcgtctcagccccacccccagcttggatttcctcggtttgcatacagtgtttgactaactgtccagcaggcccttgatggctcccaaaacctccaggccaatatgccttcccttacctgggtagggatgggagcatgaggctgtgcttcagggcagaattcctccagactttatatagaactaagttaagttattggtttttgtaataaaaggtgtgaactgc

SEQ ID NO: 281 - DNA, 2563 bp, Rattus norvegicus
  Genbank Accession No. NM_057141
attggtggatccatttagttcaagaaaatggagaccgaacagccagaagaaaccttccctaacaccgaaaccaatggtgaatttggtaaacgccctgcagaagatatggaagaggaacaagcctttaaaagatctagaaatactgatgagatggttgaattgcgcattttgcttcagagcaagaatgctggggcagtgattggaaaaggaggcaagaatattaaggctctccgtacagactacaatgccagtgtttcagtcccagacagcagtggccccgagcgcatactgagtatcagtgctgatattgagacgattggagaaattctgaagaaaatcatccctactttggaagagggcctgcagttgccatcacccactgcaaccagccagctcccgctcgaatctgatgctgtggaatgcttaaattaccagcattataaagggagtgacttcgactgcgagctgagactgttgattcatcaaagtctggccggaggaattattggtgttaaaggtgctaaaatcaaagaacttcgagaaaacactcagacaacaatcaagcttttccaggaatgctgccctcattctactgacagagttgttcttattggaggaaagcccgatagggttgtagaatgcatcaagatcatccttgaccttatatctgagtctcccatcaaaggacgtgcacaaccttatgatcccaacttctatgatgaaacctatgattatggtggttttacaatgatgtttgatgaccgccgaggacgacctgtgggattccccatgcggggaagaggtggttttgacagaatgcctcctggtcggggtgggcgtcccatgcctccttctagaagagattatgatgatatgagccctcgtcgaggaccaccaccaccaccacctggtcgaggtggacggggtggcagcagagctcggaatcttcctcttcctccaccaccaccacccagagggggagatctcatggcttacgacagaagaggacggcctggagaccgctatgatggcatggttgggttcagtgctgatgaaacttgggactctgcaattgacacatggagcccatcagaatggcaaatggcttatgaaccacagggtggttctggatatgattattcttatgcagggggccgtggctcgtatggtgatcttggcggacctattatcactacacaagtaactattcccaaagatttggctggatctattattggcaaaggtggtcagcggattaaacaaattcgtcatgagtctggagcatctatcaaaattgatgaacctttagaaggatctgaagatcggatcattaccattacgggaacacaggaccagatacagaacgcacagtatttgctgcagaacagtgtgaagcagtattctggaaagtttttctaagactagtgaagaactgaaggagtcctgcatctttttttttttatctgcttctgtttaaaaagccaacattcctctgcttcctaggtgttctgcatttgaggtgtagtgaaatctttgctgttcaccagatgtaatgttttagttccttacaaacagggttggggggagggcatgcaaaaaaactaacattgaaattttgaaacagcagcagagtgagtgacttttattttttgttcattgttggtggttttaaaaattccccccgtgtaattattgtgaacaccttgctttgtggtcactgtaacattggggggtgggacagggaggaaagtaatagtccacatgtccctggcatttgttcagagcagtgtgcagaatgtaatgctcttttgtaagaaacgttttatgatttttaaaataaatttagtgaatctatttttggtggtctttttttttttttttaaagacaatttcaaatggtggttgaattttccagcccacccctaaactaaacactaagtttgattttcagcagctcctctgttggatataagtgcacctcttggatatagacaaacacattggcaaatttcagtttgggtgatttcttaatggttggaaagacttggcttgataaatttccatcacatattcatgcttataataagcttgggattttgtttgtttttgcaaatgtttgccactacttttcaacagttttctgttagtcgtggggaactgcggtggggagcaatactacaagagtaagcatctgagtatgtgccagaagcctggtgggcaatgagctttattaaccagagtaacacttggttatggaagtggctgatgctgaataaatcctggttatttttgttagataatttctcacctatagacttaagctgtcaactgctagcgtcttgttagttgaactttgtaaaaatatatatatacttgtttttccattgtatgcacaatgaaagaaaaaagatgtaccatttctctgttgtgtgttgaattatgtaggaaatgtttgtgaacgattcaaaaaaaatggaaaagttcctgtggatgttttgtgtagtaacttggcatctgtattgatagttccaaatccacatctaaataaaacttcatgatgtta

SEQ ID NO: 282 - DNA, 853 bp, Rattus norvegicus
  Genbank Accession No. NM_057144
tcatctcggcagattgactttggcccctgagtcttcaccatgccgaactggggtggaggtgcaaaatgtggagcctgcgacaagacggtttaccatgcagaagaaatccagtgcaatgggaggagcttccataagacctgtttccactgcatggcctgcaggaaggctctggacagcaccacagtggcagctcatgagtcagagatctactgtaaggtctgctatgggcgcaagtatggccccaaggggatcgggtttggacaaggcgctggctgcctcagcacagacaccggcgagcaccttggcctgcagttccaacaatccccaaagccagcacgtgcagccaccacgagcaacccttccaagttctctgcgaagtttggagaatcagagaagtgcccacgatgcggaaagtcggtatatgctgctgagaaggtcatgggaggtggcaagccctggcataagacctgctttccgtgcgccatctgtgggaagagcctggagtccacaaatgtcactgacaaggatggggagctttattgcaaagtttgctatgccaaaaattttggccccacaggcattgggtttggagggcttacacaccaagtggaaaagaaggagtgaaacggcgtgctttctcacagccctgctagtcaacagcagggcttagtgaccccatagatgtaactttggccccgcagcctcctttgtagctggactgcatttctcttcagaagcagtcataggctgcactgaccgtaaaaagagaccaccggaaatgaatctgcaaaagatgcttcattatttactatttttggggtgggagagacaataaacgttttaatggtaaaaa

SEQ ID NO: 283 - DNA, 1569 bp, Rattus norvegicus
  Genbank Accession No. NM_057194
agtgctggctcgcgtcatccagagtgagtccctctgcgaggctttagggagagctgtgcgacagctgcaccactagcaaggggttgggactcacgactgccaggagccagctgtccaccttgcagacctcagagcagaaggagcctcagtttaaatcatggagaagcacggaccaccagaacatgctgcttaccccattcctcaggctgactaccaagggtcccagggtccctatccaggaccgcagggtccatatccagggccccagggtccctatgcagggcctcaaggtccctatccagggccccagggtccctatgcagggccccaaggtccctatccagggccccaacctggctacccagttccaccaggcagttatgcaggtggtgacccaagtggctttcctgtccaacatcagccggcgtataatcacccaggtggacctgggggcaccccatggatgcaagcaccacctccacccctggactgtccgcctgggctggaatacttaacgcagatagatcagattctggttcatcagcagattgaacttctggaagtcttaacaggctttgaaacaaataacaaatatgaaatcaagaacagccttgggcagagggtttactttgcggtggaagatacggactgctgcactcgaaactgctgtggggcgtctagaccgttcaccttgaggatcctggataacatgggccgagaagtcatgactctggagagacccctgagatgcagtagctgctgcttcccctgctgcctccaggagatagaaatccaggctcctcctggggtgccagtaggttatgtgattcagacctggcacccatgtctgccaaagttcactctccaaaatgagaagaggcaggacgttctaaaggtcgttggtccgtgtgttgtgtgtagctgctgttcagacattgactttgagctcaaatctctagatgaggaatccgttgttggcaaaatttccaagcagtggtctggttttgtgagagaggccttcacggatgcagataacttcgggatccagttcccgctggacctggatgtgaagatgaaagctgtgatgcttggcgcttgtttcctcatagatttcatgttttttgaaagaactggaaatgaggaacaaaggtcaggagtatggtagtagtttcccaagattcctcggctgtaaggactgcatgccgatagacgctgagaggagatcaaggaatcaaaggaacgcaccatggcttcttttcctttactgaaataactttatatcaattaacctgtgatggctgtaggcccttttgtacaattgtgctctcaaattagagtttattttctgtaactctgtcatgtatttgtttttatacattcttaaggttgtcactgtgaatttgtgaaaaaaatatatgaatttatcaacatagaaatgatcttgtctatgaaaagaggctttgacttagtctttcattcattttcatttttatgaaaacttaaatatattgttatttaatataaagctacatattaaatgtaatttaatttaaaaaaaaaaaaaaaaaa

SEQ ID NO: 284 - DNA, 1101 bp, Rattus norvegicus
  Genbank Accession No. NM_057208
agcagctgggtaggcaccatggccgggagcaccaccatcgaggcggtaaagcgcaagatccaggttctgcagcagcaggctgatgatgcggaggagagggctgagcgcctccagcgggaagtggagggagaaaggcgggcccgggagcaggctgaagctgaggtggcttccttgaaccgtaggatccagctggttgaagaggagctggaccgcgcccaggagcgccttgccactgctttgcagaagctggaggaagcggagaaggctgctgatgagagtgagagaggtatgaaggtgattgaaaaccgggctctaaaagatgaagaaaagatggagctccaggaaatccagctgaaggaagcaaagcacattgcagaagaggcagacaggaagtatgaagaggtggctcgtaagttggtgatcattgaaggagacttggaacgcacggaggaacgcgccgagctggcagagtctaagtgttctgagctggaggaggagctgaagaatgtcaccaacaacctcaaatctcttgaggctcaggcggagaagtactctcaaaaagaagacaagtatgaagaagaaataaagattcttactgataaactcaaggaggcggagacccgggctgagtttgctgaaagatcggtagccaagctggaaaagaccattgatgacttggaagatgagctctatgcccagaaactgaagtacaaggccattagcgacgagctggaccacgccctcaatgacatgacctctatataaactgacaccgtttctgctctgtcctggatctacccccctttcaggggtaattgatatgatataaggggcctaggaatacaattgatgttagggcgtttattagaataatgttggtgtactcggctatgaagaatagggcgaatggtcctgcggcgtattcgacgttaaagcctgagactaattctgattctccttctgttaagtcgaagggagctcgatttgtttctgctagggttgaaatgtatcatattatggctattggtcaggcggggattaatagtcagatatgttcttgtgcacttataagtatttctagggagaaggagccgcttatta

SEQ ID NO: 285 - DNA, 2721 bp, Rattus norvegicus
  Genbank Accession No. NM_057211
gcggccgtcggcggacgcgggaagaagtgtcttgtaggcgcggcgccccactcagccccggcccccctcatccgcgtactcggctgatgcctcagggcgtcagctcggcggagaggcggtcgaggcgtgcgcctggctagcagttggctttccccgtgactcggacacgtttgcagtcgaataaacttgcgaccgccacgtgtggcatctctccaaggaaccggctcaggaggagggcgcgcccatcgtgggatcgcgcggggcgcccggcagggcggcggcgacagcggcagagccggccgcggctgctgcgtgcggaggcgctgccggttacgtaaagatgaggggctgaggtcgcctcggcgctcccgcgagtcgcaagctcccgcgcccccgccccctcggccgcgccgcaccgcgctcgtcgtccgagaccagggcagggctagccgaagctccgcagccaccctcaagtttggccgcaccgcccgggctgccgtcgcccgcaccatgtccgcggccgcctacatggacttcgtggctgcccagtgtctggtttccatctccaaccgcgccgctgtgccggagcacgggggcgctccggacgccgagcgactgcgactacctgagcgcgaggtgaccaaggaacacggtgacccgggggacacctggaaggattattgcacactggtcaccatcgccaagagcttgttggacctgaacaaataccgacccatccagaccccctcggtgtgcagcgacagtctggagagtcccgatgaggatataggatccgacagcgacgtgaccaccgaatctgggtcgagtccttcccacagcccggaggagagacaggattctggcagcgcgcccagcccgctctccctcctccactctggagtggcttcgaaggggaaacacgcctccgaaaagaggcacaagtgcccctacagtggctgtgggaaagtctatggaaaatcctcccatcttaaagcccattacagagtgcatacaggtgaacggcccttcccctgcacgtggccagactgccttaaaaagttctcgcgctcggacgagctgacccgccactaccggacccacactggcgagaagcagttccgctgtccgctgtgtgagaagagattcatgaggagtgaccacctcaccaagcatgcccggcgccacaccgacttccaccccagcatgatcaagagatcaaaaaaggctcttgccagccccttgtgaggtgctccccatatggcaaccaggcagagatggtcccggaaggacagagctcccaggaaacagacggacacatggaaatctgccaccgcagagttgtgctggccacaggaggtcactgctctttggtcaatattctgacactctccctgcgctgtttccaaaaagcacacggtagcctaagatcaaagtcaacatttggtccccttgcagaggccactctgaaccgtctctgactgttggagggcaggcaaataaatgcttttggtattttctcctttgttttggggggtggggggagggggcaaggccaagacttggggtaggatttttgaagattcaggctggtgtacatacgtctgactgggtgagttgacccctggcctcccacagtgactctggatccttgatgcttgctgactctcagaattgtttttcttctctctcaatgtcacgaccagagtgcttcagcttgtttagcagagccactctcgaatcacgttaacttttgagatttaaaaaacaaaacaaaacaacaaaaaaaaaaaaaaacccctccatagcacagctgtcttttatgcaagcaagagcacacctactccagcatgatctgtcatctaaggacttcaaaacaaaacaaaacaaaaaaaaaagttacttatagtcagtggataagcagagtccgaatttacactaaacaagacagaccttcgaggggtcataagtccggaactttcaaaccttgcttcgtatgaatcgtactatctgaacataaactgcacttttattttctaataccgagggtgaatacggtaaatccatgccttgagggtagaagccgacattctgtttggcacacgttattatctgcttattttccaggatacacatttccctgagaacccacggcagagatgtgagggcagaatgtatggaaacacatgctgaggaggggaaggaggaggggagtgctttaaagatacaaaaaaaaaaaaaaaaaaaaaaagagcaaacaattttaacttcatgaatttgtttgaattttcccaagcttcagataacaacgccactcacgggactaggacgctgcaagagcattgggctctgtgtagcattagctgataaatgggtgtatagccatcaccagacctggaaatgcccccttttggtgggggtgggggtgtttcttggtctctctttcgttcctatgaaatttccactaagaggtgcaagagttatatcaaaggaaagggaactgaaatatggaaaaaaaaaagtttgcccctgtaagtagtctctagggaaggaagatgccacaatggtttcagaggcgactctgcagaacagtcccttctgctgaacataggtcagagaaacactcgtgaatggcatcacatcgccaactgtctgcatcatggcccaccactacttagcttgtatctcggtgtctacacaatggcctgaaccactggtcaccat

SEQ ID NO: 286 - DNA, 432 bp, Rattus norvegicus
  Genbank Accession No. NM_078617
atgggtaagtgtcgtggtctccgtactgcccggaagctccgcagtcaccgacgggaccagaagtggcatgataagcagtacaagaaagcccacttgggcacagccctgaaggccaatccgtttgggggtgcctctcacgcaaagggaattgtgctggaaaaagtaggggttgaagccaaacagccaaattctgccatccggaagtgtgtcagggtgcagctcattaagaacggcaagaagatcacagcgttcgtgcccaatgacggttgcttgaacttcattgaggaaaatgatgaagttctggttgctggatttggtcgcaaaggccatgccgtgggtgatattcctggagtccgctttaaggtggttaaagtagccaatgtgtctcttttggctctgtacaaaggcaagaaggaaagaccaagatcataa

SEQ ID NO: 287 - DNA, 2537 bp, Rattus norvegicus
  Genbank Accession No. NM_080477
gcctcactcgggtggtggcagtgttcaagaggactaactcttgtcatccggattccagttcgattcctcggatccaattaggaagacactccatcatgcgattggagtcctcgtcgtggcccagagatagaagacggacggggaaggggagacctaaccagatagctaggtgcctcctgaagaactaccatgtctgagaatagtacattttccacagaagacagcagcagcagcagctataaaccccacgcctcaaacctccgaagggcagggaagaaatgctcatgggcttcctacatgaccaactccccaacactcattgttatgattggcttgccagcccggggtaagacttatgtgtccaagaaattaacacgctacctgaactggattggagtacctaccaaagtgtttaatcttggtgtatatcgacgggaagcagtcaagtcctataagtcctatgacttctttcgacatgacaatgaagaggccatgaagatccgcaaacagtgtgccctggtggcactggaagatgtgaaggcctactttactgaagagagtgggcagatcgcggtgtttgatgccaccaataccactcgggagaggagggacatgattttgaactttgccaagcagaatgccttcaaggtattctttgtggaatctgtgtgtgatgatcctgatgtcattgctgccaatattctggaggtaaaagtgtcaagccctgactaccccgaaaggaatagggagaatgtgatggaggacttcctgaagagaattgagtgctacaaggtcacttaccagccccttgacccagacaactatgataaggacctctcgttcataaaggtgatgaatgtaggccagaggtttctggtcaacagagttcaggactacatccagagtaagattgtctactacctgatgaacatccatgtccatcctcgcaccatctatctgtgccggcacggagagagcgaattcaatcttttgggaaagattgggggtgactctggcctttcgttgcgaggaaagcagtttgctcaggctctgaagaagtttctggaggaacaggagatccaggacctcaaagtgtggacaagccagttgaagaggacaattcagactgctgagtctcttggggtgacctatgagcaatggaagatcctaaatgagattgatgctggcgtgtgtgaggagatgacttattcggagatcgaacaacggtatccagaggaatttgcacttcgagatcaagagaagtatctgtatcgatatcctggtggggagtcataccaggacctggtgcagcggctggagcctgtgatcatggagctggagcggcaaggcaacgtcctcgttatctctcaccaggctgtcatgcgctgcctcctggcctacttcttggataaaggcgcagatgagttgccgtacttgaggtgccccctccacatcatcttcaaacttactcctgtggcctatggttgcaaagtggaaacaattacactgaatgtggaagctgtggacacacatcgtgacaagccaactcacaacttccccaagagccaaacccctgtaaggatgagaaggaacagctttacgcctctgtccagttcgaacacaataaggcgtccaagaaattacagtgttgggagccgacccctcaagcccctcagccctctccgtgccctggatatgcaagaaggggcggaccagccgaagacccaagtcagcattccggtggtgtgactgtgtgtttcctccagctatggcctcttgcccttgtcactaatcaatcaagaagtcacttaactgtaccccactcctgtcccagtgttaatctgaacatggaatctgagctcagacgtgtgcagagcagccattctctagtgtaaacacctcagccgggggcaggatggcaagttgggtttttagatgagatgatctgacagaagaggagccaagcatgagtcatagacttggttcttctgtttcctgatgtctgaccccagtctttgtgaagtgtgtgtgtgtgtgtgtgtgtgtgtgtgtgtgtgtgtgtgtaagggagggttgctgggaggagtgctgagtagagtgagatgtagcaacctatctgtccctcatgtgtgtctttaaatctgtcttcatatccttaacttccctgtcctatagcttctctttgggctgtctggcgtgatgcatgacattgtgatgtcttaaagtaagggactgttgatagctatctaagccccattggtgctgtctgcacgctggtctgggtctgcactgggagagtcttttcccttcccttctcccttcctctccagccaggtccagcaagggtcagcccaggctacagaacatctacagaaagccctggagtttgcaaatggacatagggaagtggagaatgtgctggctaagcatagacgcccctcaatggcatccctcactttgctctcctgatgtgaggctgaggccagacctctccgaggaactggatctaccaaaaagcttggcatgccagcatccct

SEQ ID NO: 288 - DNA, 3219 bp, Rattus norvegicus
  Genbank Accession No. NM_080888
ccgaccatgtctcacttagtcgagccgccgccgcccctgcacaacaacaacaacaactgcgaggaaggggagcagtccctgccgccgcccgctggcctcaacagttcctgggtggagctacccatgaacagcagcaatggcaacggtaatggaaatgggaagaatgggggcctggagcacgttccttcctcgtcttccatccacaatggagacatggagaagatccttctggatgcgcagcatgagtcgggacagagcagctcaagaggcagttctcactgtgacagcccttcaccacaagaagacgggcaaataatgtttgatgttgagatgcacaccagcagggaccacagctctcagtcagaagaagaagttgtagatggagaaaaagaagttgaggctttgaagaaaagtgcagactgggtatcagactggtccagtagacccgaaaacatcccacccaaagagttccatttcagacaccctaagcgtgcagcctctctaagcatgaggaagagtggagccatgaagaaagggggcattttctctgcagagttcctgaaggtcttcatcccatctctcttcctctctcacgtgttggctttggggctgggcatctatatcggaaaacgactgagcacaccttctgccagcacctactgagggagacgaaaagcccctgggaatccgtgtggcctgtgaagtggtgtattgtagtttgaatttgagacctattgtaagcatgatccccacctacaaccctatttttacatgcccaattccaagtaactctcaaatccagtattttactcaaactctgttggggcattttactaaccttgttccctttttggcctgtaaaacactttagagattcctaacagagtttactgttgtttagaaatttgcaagggcttttttcagcaacgccaccagcagattataatcttgtcaacagtgcatcgtctcctcttagtaccactagtcacacctgcatcattcatgctagaagctgtgttctagccatgcaattacatctctttctaaatgaggtcaggtttgcaaataatactatgaaagctttgtttagtctttgttttgttttccaggacaaaaacaagcttccctgagcttgagtttataaaatgaaaacaaaccaaaaaaaggaaaaaaaaaaaaaaaaaaaaaaaaaaaaaaagaaggcaaaacacaagcaaaaaaaaaatcctgggcaataaaaattactttaaagcagctctggagcccctctttcctcatcctcctgccgccctgaatgggtaggagacagctgtgtgagggacagacaggagagaggagaggagagcatgctcgcaggtttaacatcagtatattgcaatgctgtcttttctatggtagagaatctttatttgtaaggagtgtctcaggcctagacatacatgaaacttacttttgagattttcatgcgtttggtattttcatgtgttaactgcatgtgaatttttcatgactttctttgtttttctagtttctttttttctaagaagagacttggaacgagtctgattcatggtgttaatagaggcttcttgttttaggaagctttgcttacactctggagcctttacactctgaagaataacttcagagttattccaagtacttgtgtaacttggaaaagtagacttgggttgtgggaacagttgataaagttctggaaagatgccattcactctctttgggtccttacttcctgttgttgcctacagtcttcccaaggtctccttagtctctcccaggcccctgtgactgtcttacgtaagtgtcttctcagttctgtcaaattcctgatgctctatagcactcagaaaattctttgaatggcagactttcttctgtctgtttctaaaatgtgaagctttaggaccaaattgctagtatcaggattgcagattatctcaagtagattttgttagatttcagagcacagcatcactctgagggaatctgtgtcttatatataaataattactgttaatgatgtacactttgctgaagttatagaaccattgtgaatttcaaggctagcaacctacacggtgcaccaggttgacttgaataaatttggcaaccaggtttgccagcatgcagaaactcactcttctctcacataaagggttataaaattggtgtgttatatggaaatggaaaggaaggtagataagacatttctgtcatttttcaagaacatggctgtttatctttaaggcagataatatatccaaaatagttttgtgagttattttctttctggcatttaatgtctacctgatttgagggcaacttctgcccttttcctttcttgctcttaaacctggtgatgcttgatctgccttctcacctattacttcaagtgtttataattgagtttcttaggaagaaagcaaatctggtggcctgttgttttgttgttgtttttcaaattgtcaggactgctgaggctaacctgcagcacagtttgcagcactgacgtgtgagcagagcagaatcactctttaatgctcttataggcggacatcacctctctaaattcagtagcagtttcatcggcagtgccattgaactgtgggaacatttatgattttgtctcaaccttaaaactaaatttagttttgccagtttttgaaagtatcaataaaatcatggaatatgtcccagagcaactgtccatcagtgagcatgtacgatgtcgatttgcggttccaacatacaggatgttcatgctcctacacagattcttgttgagtgaaaacagattgccctatcacaaagcaggattcaacagagttgaaatttaagataaggtttaaaaagctttattcctgtttacaatttgggatgaaaagcaggcttcgttctaagtttattgaaacctggctcagatgtttgtaggtcaagagaaaagcggcacagagacagcacagtgagtcactcaattgcagtaaagagtgaaatggagacagcccgtgagacgaatctcacagtgaagcgtttgttggacctcctggtattaatggagccagagtgacatgcatccttcgtctgtctcttcgtcagcactggcgtcattcctttcagtttaaagaacacatgtaacttgtagctataaacattttgtgccattaaagctctcacaaaacttaaaaaaaaaaaaaaaaa

SEQ ID NO: 289 - DNA, 1329 bp, Rattus norvegicus
  Genbank Accession No. NM_080910
atggcgacagctgaagtactgaacatcgggagaaagctctatgagggtaaaacaaaggaagtctatgaattattagacagtccaggaagagtcctcctgcagtccaaggaccagattacagcaggaaatgcagctagaaagaaccacctggaaggcaaagccgccatctccaataagatcaccagctgcatatttcagttgttacaggaagctggtataaaaactgctttcaccaagaaatgtggggagactgctttcattgcaccccagtgtgaaatgattccaattgagtgggtatgccgaagaatcgccactggatcttttctcaaaaggaaccctggtgtgaaggaggggtataggttttatccaccaaaagtagagatgttcttcaaggatgatgccaataacgacccacagtggtctgaggagcaactcatcgctgcaaaattttgttttgctggactcgttatagggcaaactgaagtggatatcatgagtcatgccacacaagctatttttgaaattctggagaaatcctggctgccccaaaactgtacgctggttgatatgaagattgagtttggcgttgatgtaaccaccaaagagattgttcttgctgatgtcatagataatgattcctggagactatggccatcaggagatcggagccagcagaaagacaaacagtcttatcgggatctcaaagaagtaactccggaaggacttcagatggtaaagaagaactttgagtgggttgcagaccgagtggagttgcttctcaagtcaaacagtcagtgcagggtggtagtgctgatggggtcgacctctgaccttggtcactgtgaaaaaattaagaaggcttgtggaaactttgggattccatgtgaacttagagtaacatctgcacataaaggaccagatgaaactttgaggattaaagcagaatatgaaggggatggcatacctactgtatttgtcgcagtggcgggcaggagcaatggactgggcccagtgatgtctggtaatactgcatacccggttatcagctgtcccccaatcacagcagactggggtgctcaggatgtgtggtcatctctgcgactgcccagtggtattggctgttcaactatactttctccagaaggatcagcccagtttgctgctcagatatttgggttaaacaaccatttagtgtgggccaaacttcgagcgagcaaactgaacacgtggatatccttaaagcaggctgataagaaaatcagagagtgcaatttgtaataaagcaatttaatttgtaggagaaaagttacatattcctagtttggattt

SEQ ID NO: 290 - DNA, 2912 bp, Rattus norvegicus
  Genbank Accession No. NM_130416
aagctgaatcgaattcggcacgaggcagggtcccgcccgggcttgggggcggtccaggcagccagcatcctcgcgccgcccatgcgccacgccctccggccctccctggctccatattgcaggaaagcgggctagggtgtgacgctgctttctggttcagaatgtcatacccaggctaccccccgacaggctacccacctttccctggatatcctcctgcaggtcaggagtcctctttccccacttcgggtcagtatccgtaccctagtggctttccaccaatgggaggaggtgcttacccaccagctccaagtggtggctacccaggagctggaggctacccctcacctggaggttatccagcccctgggggctatcctggaaccctaaatccagggggtcctccatcctatcctggaggtcaaggctttggggccccacctggtggggcaggcttttctggctatccacagccacctgcacagtcttacggcggtggaccagcccaggttccagtcccaggtggctttcctggagggcagatgccatctcagtaccccggaggacagtctccctaccctggccagcctgctgcgatgactcagggcacccaaggaacaatccgcccagccttcaacttcgatgctatgagagatgcagagattctccgcaaggcaatgaaggggtttgggactgatgagcaagcgattgtggatgtcgtgtctaaccgttccaatgaccagaggcaacaaattaaagcagcttttaagaccatgtatggcaaggatttaattaaagatctcaagtcagagttgagtggaaacatggaagaattaatccttgccctgttcatgcctcctacatactatgatgcctggagtttgcggaaggcgatacagggagcaggaactcaagagcgtgtgttgatagagattttgtgcacaagaacaaatcaagaaatccgagacattgttagatgctatcaattagaatttggacgcgagctcgagagggacattagatcggatacctcaggacatttcgaacggctcctcgtgtccatgtgccagggaaaccgtgacgagagcccaagtataaaccaccagatggcccaggaagatgcccagcgcctctatcaggctggggaggggaggctagggacagacgaatcctgtttcaacatgatcctcgccacaaggagcttccctcagctgagagccaccatggaggcttattccaggatggctaatcgagatttgctaagcagtgtgagccgggaattttccggatacgttgaaagcggtttgaagaccatattgcagtgcgccctcaaccgccctgccttcttcgccgagcgactctactattccatgaaaggcgctggaacagatgactccaccctggtcaggattgtggtcactcggagtgagattgacctcgttcagataaaacagatgttcacccagatgtatcagaagactctaagcacgatgattgcaagtgacaccagtggagattacaggaagctgctcctggccatcgttggccagtgacggggatttttttccctttaaggaatgaagctcttcagggcctatctttctgagcaatgagacctgcatgcagccacgtcagacaccaactgaccagagtgcttttccactgaggcctgtcagggggtgtgctgcgtttgcacatgttgtcactgccttaattctaatgttagtctctttctttctgtatccaatcagtgtaaaagccatgtcaatgacatagtaatgtaaatttgtaaagcttcactcccactgctttcactttaatccggatttcaaattaaaaaaaaaggattcaaattaatgaaaaattcacagcaatctctaattctgtgtaacgttaaaagaatgagagaatgagaacggtgttcattctcattaaaacatgccgttctggtttgattgcagaaggtgatattcagttcaggaataagcctccgtgactcacatccatggctaaagtttcctggtacaaagggaataaatctgtctcagctagtaatagtgcaggacggaaaggccatgtggtgttcccctaaatacgacagtctatgcaggcaagcttctcggaggttctggaaatgtcacttggtgttcttgagacccctttccatcccaaggccagcagttgtcagccgttagtaacgcaccacactgtgtggtaggagtgccttgaacaccacacagctctgacagtggtgtcctgtacaaggctggccctcgtggtaaccagcatgtccctgagaccatcgagagcttaactggaagcaggggaaagctcctcctcttcctcctccccctcttcttcctcttcctcctccccctcctcttcctcctccctttattttttcttctttccttccttcttcttcctcatttcctcctttttttctcccccatagcccaggtctttgagtaacctgattacttctgtgttcctacccagtccagtgaatgaggaaaaggcaagcccattttacatttaattgccacaaggaaaattacctttaaaagcctcgttttttggtcttttaacaacaaatcttatgtcgtacgagtggtttgcctgcgttacatgcacatgcacccaaccacttgcatgcctattttcctgaggaggccaggagaggttttggaaaccctgaaatggagattatagatgcttgtaaactagccactcagtgctggcatcggaacccaggtcctctgtgtttggtttattagaatagaaaagtgaaaagctatagtctgagctttgattttaagataaatgtttaaacagtctggtctcatgactttacagaaacaataaaattgtataatacttctttaaaaccacaaaaaaaaaaaaaaaaaaaa

SEQ ID NO: 291 - DNA, 922 bp, Rattus norvegicus
  Genbank Accession No. X77117
ggcacttgagcctgctgtccatctggaaaacgttgcatgcttggcccgctgctctggactgcctctctgcctgttgtgagttccagccagccctgatagacccattccttttgtagagtatataaggtctgccccagtagctcctagtgactctgggcctggttggtggcttagattcccacagaaggtgctcaattatccacctgttcctcctcctgggtcccttcccccattgtctggagcccagcccagagcccccctgtttcaggatttcctccatcatcctcccacttcctcccacttagaacaagtcaggagggctgtggtcacttgatcctggcaggcagcaggagagtgggtggtcggcaggtagggagcctatgctggcttgcttagcccaggtcggacttggcaaccggaggaggcgggactgaactctctaccaaccttctctatccagcctgggcagaatggattccaggctttagagggggggaatgccacagtgagaagcccaggcaggatgtcccgtgggtgaggaacaggctgtgcatcccttagctatagtgagtgagctgggggctccctcctgggaccctggaacccagtttctttacctccctttgctgtcagagcaaggagaagaagaggtaggttccttggaatgtggcctgcaaggtcaaggtctgggaggcagctgcctttaaggacttaaaactgagaggggtgtgtgtgtgtgtgtgtgtgtgtgtgtgtgtgtgtgtgtgtacagctgaggagaagctggggcagggacttggccttggccatctgcctcctgtttacttgccctttgctgctgggactagggtggtgccatggaaggatgggggacagcctgtttaccccatgccagtaaggatagaatatatccagtcccctg

SEQ ID NO: 292 - DNA, 541 bp, Rattus norvegicus
  Genbank Accession No. AA800803
gacattttagactgacttcgtttattgagcaccagtggagagcaggctgtagtacactagagcagagatgaaccggccctcccatctaggggcgtacagtcggggagaacccaacagcttacagattcctctaccgggggttaggatgagacaggaaggtgatctttacagcacctaactcagtcacctggggcagctggggcctgacctggggcagctgggggtaaggtactgcagggcaggggacatctaggggaaggcacagaggtaagatagcatggggcccggggaatgccaagagctcagggctcagaggcagagtgggggaggtagtggctaagatgtgaggaaaagctccattagaagctgggtttctccaaagggctctgcctcggcctagccacagcatgcccaaagaggagagtctctgcacccaggagatagctgtttgaaggagaaggcctttagtctggaaggatttgctgtggtccactagtatgtttgtggccgtgctggggcagatgctctgagaaggttcaag

SEQ ID NO: 293 - DNA, 1632 bp, Rattus norvegicus
  Genbank Accession No. X61296
gaattaacattgatggagaaaccaagatattccatgacaaaaccaaatttacacaatatctttctacaaatccagcactacaaaggataataaatggtaaagcccaacataaggaggcaagctataccctagaggaagcaagaaactaatcgtcttggcaacaaaacaaagagaatgaaagcacacaaacataacctcacatccaaatatgaatataaagggagcaataatcactattccttaatatctctcaatatcaatggcctcaactccccaataaaaagacatagattaacaaactggatacgcaatgaggaccctgcattctgctgcctacaggaaacacacctcagagacaaagacagacattacctcagagtgaaaggctggaaaacaactttccaagcaaatggtcagaagaagcaagctggagtagccattctaatatcaaataaaatcaatttccaactaaaagtcatcaaaaaagataaggaaggacacttcatattcatcaaaggaaaaatccaccaagatgaactctcaatcctaaatatctatgccccaaatacaagggcacctacatacgtaaaagaaaccttactaaagctcaaaacacacattgcacctcacacaataatagtgggagacttcaacaccccactctcatcaatggacagatcatggaaacagaaattaaacagtgatgtcgacagactaagagaagtcatgagccaaatggacttaacggatatttatagaacattctatcctaaagcaaaaggatataccttcttctcagctcctcatggtactttctccaaaattgaccatataattggtcaaaaaacgggcctcaacaggtacagaaagatagagataatcccatgcatgctatcggaccaccacggcctaaaactggtcttcaataacaataagggaagaatgcccacatatacgtggaaattgaacaatgctctactcaatgataacctggtcaaggaagaaataaagaaagaaaataaaaagtttttagaatttaatgaaaatgaagatacaacatacccaaacttatgggacacaatgaaagctgtgctaagaggaaaactcatagcgctgagtgcctgcagaaagaaacaggaaagagcatatgtcagcagcttgacagcacacctaaaagctctagaacaaaaagaatcaaatacgcccaggaggagtagaaggcaggaaataatcaaactcagagctgaaatcaaccaagtagaaacaaaaaggaccatagaaagaatcaacagaaccaaaagttggttctttgagaaaatcaacaagatagataaacccttagccagactaacgagaggacacagagagtgcgtccaaattaacaaaatgagaaatgaaaagggagacataactacagattcagaggaaattcaaaaaatcatcagatcttactataaaaacctatattcaacaaaatctgaaaatcttcaggaaatggacaatttcctagacagataccaggtatcgaggttaaatcaggaacagataaaccagttaaacaaccccataactcctaaggaaatagcagcagtcactaaaggtctcccaaccaaaaagagcccaggtccagac

SEQ ID NO: 294 - DNA, 642 bp, Rattus norvegicus
  Genbank Accession No. AI171607
acctaacagggatttatttttatttacatggagtttggagacgggaaagctgttggcacttgcttggtcagacgatcagatcacagggtttgtggatcttttggccttccctcaggtaaaacatggttgctaatggtccaggcatgacatcctcaatcaagaagggagaggccaagtgagggtttcaggaaaggcatgagttcttctagtagctcctgtagacttccacttcaatttcattggccatgcctggtcacatgctcagccaaacctacagagttggctaggagaatgagaatctagatttatagtcacaaaggcagtgagagagacggaattgggactaacagattcacagagtatcaaggccgctactatggttcccctggaagacctgccttgaggcctcttgtactttgggggtgtctctttcataccttgccatatctcctgggactgccaagtcctttgggcggtcctactctattccagaggccccgcctgttcctctttacatgtcagaacagcaatggacctgtaaggggagaacccccaaccctctatttaggaaatacacatcttcagcataatacctcaccagcagatacttaagacagcttcactgcatttaaaccatcgttt

SEQ ID NO: 295 - DNA, 612 bp, Rattus norvegicus
  Genbank Accession No. AI230578
accatttgaaatacatctttaattttgtccaaatcaatatgtaatctacaaaatactttgttacatgattatcaaggtcagtctgttctgtgtttgtaacaataggtcaggaagtcatagtctgagtaaaacattgtaacagccattgttaaggaaacatggtaatagtcattgttaaggaaaactgtctaactgaagttgtaggaaataggctaaatcataaatatagttcctgcatgaaaggcaactgcatttccctgatacacagaccagaccgaaaggggaactggaaagtgtgattttcgtatcattggtaattgataaatagccactcccacagatatggaaagtgttctgatgctcagtcctacataactgatcatgtaactttctcttattagcacagttaatgtggtcctgtgctgcccagacaacgtgaccagggcagtgaaggcagaaagacaggttaaaaactggtagtatccaaagtggtcacacaagtaaattaaaatgtttaaaagtagtgtttcttcttgaattccctctccagctaatttaaaagaggggattttgaagatcactgctggctcctggggagagattttacttttt

SEQ ID NO: 296 - DNA, 544 bp, Rattus norvegicus
  Genbank Accession No. AA925674
tttttttttttttttttcctttatttcagaaatattttaatataattgtagtatagttatgaagtcacattcaattcactgaatatattccaagtattaataaaaatattatacatcttatctcactatgctgatataattaaagcattttgttcttacaggtgacactagtaaccacatccatattcgcattgctagtggacagcatgtaagtaaatgtgtatcatgatagcagggcttcagtgtttttaaaatctgagttatcaaaagtgaattttttaaatgttacaattcatgagtcttagaaagaattaaacaatttaaggcaagattctgaactttagatacaactttaatttgaaaaaaaagtacttaaaaagatacacatgctttaacaactcattcacatagacacagtaataaaaagcactggtgccaattctcattggattcctcaaagaaaacaggttcttgggatgaaccattatcttcaggtcctagagcactggcaagaacaaagaattctggcacaggacttgtatgt

SEQ ID NO: 297 - DNA, 560 bp, Rattus norvegicus
  Genbank Accession No. AA817837
tttttttttttttaattacaaactttatttgtccatccagttcacagtttatgcgtggtacatcccaccacatcagccttcaagaagggctattcaggagatgggtatagctttctctgtaagagagccccacactctaaaattttggttagaatcttcataggtttataaaagtactctctgcaagcgaactggatatatttacatttacagcttaaattcaaatttcggaaaatatgaatcttttcgtgtttttaaacatcctgggtttacttcttaagactttcatctgaatgccacgtgctcacgtaagcccatccctcctcccccagaaggaaaagaaatcggttttgcgattgcaggtagaggactccttttccttctgggctttaaaaattacacagacagtgttcagcaggtgtgagtacagacacggagggaatggtggtggtttactagatgcaggtactgatttttttttctgaatcttgaaacatccaaaaagaattacaggatataaacttaaattataacgagttatcagccttctcttaaaaagt

SEQ ID NO: 298 - DNA, 630 bp, Rattus norvegicus
  Genbank Accession No. AA819269
tttttttttttttttttcagttatgtaagtatttaatcagttctttagaaaacttcctgattagtaaagttggcttctttgaatagccttaaacattggtcaccgtttaaacaagacatcctaaaacaaacaaacagaagcaatcacataatgttcatagtaatttacaagaggatggtacacacgcagatacagaggtagaaattcactttacaatgtttcactaatacacatataccaaattcaaggcacaaaatagtttgctttacaaaaaaatactgtaaaaatgtcatttgctgttctacaatgtgaatatacctttcaaggaatctttacacccttcacaatactccatacaagatccgtcccccacactaatcaaagctggcacgaatgtggggactttttaatgcagaaattcccattatctttgtagagctgctgtgttcggtagacaaggtcctctctcctcccttaaacatgagtttgcagctccgtgaggaaagggcactttctatatgcagcaaaattcacaggtagaaaatgtataaccatttggattaaccaggtctctaaacatgtaatctagtatttcagagatttgatttaaaaatcaccaactatttagtc

SEQ ID NO: 299 - DNA, 510 bp, Rattus norvegicus
  Genbank Accession No. AI178245
gttagggcggcggcgaggtgcactttataagttacaggccaggatcccgctcaggctaattatggctattggagggagagggtgctgggaccagcttttttttggggggcgggggggtcttcaaggctagtagtctagaaggagcagatgcccgatccagccgagctaaggaccaccacctttgagctccaacctgcctatggccctatagaatccaccagcagaaacagtggctacagcgagaggtcagcagtgaccggcagtgggggtccaggggggcgccggcgagcacttcggcgtcctgtgtctgcacggatgtagggctggttccgaagatctgtgatgatgtcttcaatggccccatctcggtcactctcatagatgagtgggtctttcagctgcttccgttttagctcagagatgaggtccatctgttgtcgcctggccttgggaggagacttgggtgctggaggctcttccctggctgaggtgtcccgagctgcttccttc

SEQ ID NO: 300 - DNA, 405 bp, Rattus norvegicus
  Genbank Accession No. U95052
taatacttgagttgttgcaatatttgattatccatttggttgttacagaaaaattcttaactgtaattgatggttgttgccgtaatagtatattgcctgtatttctacctctagtaatgggctttatgtgctagattttaatatccttgagcctgggcaagtgcacaagtctttttaaaagaaacatggtttacttgcacaaaactgatcagtttgagagatcattaatgcccttgaagtggtttttgtgggtgtgaaacaaatggtgagaatttgaattggtccttcttattatagtattgaaattaagtctacttaatttatcaagtcatgttcatgccctgattttatatacttgtatctatcaataaacattgtgatacttgatgtagttgtaaaaaaaaa

SEQ ID NO: 301 - DNA, 415 bp, Rattus norvegicus
  Genbank Accession No. AI137586
  misc_feature (1)..(415): n = a or c or g or t
tttttttttttttttttaaaagggtaaacgtttatttggagttagtcttctggcaggtggtattaaggcccttcaggcagagttcaggagctcctgtatggctgcctgctgctccggactgagttgagctatgcattcagtccacaatcctccagaagtctgtacttggcgaactacattggccaggcgtttggcacaggggtcttcatgtttgatggcctcatgcatttctccttctgcaattatactgaatattttcggtagattggtattatttgggccaagaacaattggatgattactttcaatcaggtcacacaggtaactgaaggtctggacagcttcttctttatcttcatgtanggggagccacgacagccagtgtggtaagacctcctccacattcacgcagtca

SEQ ID NO: 302 - DNA, 485 bp, Rattus norvegicus
  Genbank Accession No. AI178756
atatacacaaccacatacagtccaaacagcacccagcagccataaagactcctgggggtagttaagcctgagtttcataaggatagtaaacttaagggagccacgaagcctgaagacaaattcaggacaggaaagggcaaaacagccagttccctggtggctttcctcactggaaaatcaaacatgtattcttactccaacagtcctgtccatgtttgcatgtcaccacacttagcaaaacacaacgagatcatatatgactagaactaagtgcatagaacgctgtcaggatcactgcttgctcttcctttttctcagtctttttttcccagagctttcaggtgctggagtcttttgtgtgtcttctttcactggtgacacaggcagtttcaaaatgatttcatcatcgtcattgatttccatcaactgtgatttccgtctttccaaaaacgttggtgtacaaactggcgtaggatcctcgtgcc

SEQ ID NO: 303 - DNA, 507 bp, Rattus norvegicus
  Genbank Accession No. AA818521
tttttttttttttttttacattgtaatctatttattttatacacgtgacgtcataagcaaaggctttgcttgtgttctagctaaactccaataaataaatatgtacagatatgctgagcctacaaaacagtaaagaaaaccttttcttcacaaaagatacacatatgatacatttgttccttacactgacatatgaactcattcctagcttacttaaaacaaaacccttctggactctgtatgccaatatctagaggcatgtacctggtccttttattttatccagaaagcaaagctatgcagagaaaattcctcagtttctttattaaaaaatggcctgcatatggcctgctacttattattaagtgacatttaaatgttctcaagaagttggaaactctttagaccagttgtcctgaaatgactggacaatgccctgtggatgttgtcaaaatgcagcttcttatgaactggctcactggggtgggagtggggtatggtgggggt

SEQ ID NO: 304 - DNA, 147 bp, Rattus norvegicus
  Genbank Accession No. M27207
tcaatttccccaaaagccaaaaattgggagacaattttacatggactttggaaaacatttttttcctttgcattcatctctcaaacttagtttttatctttgaccaactgaacgtgaccaaaaaccaaaagtgcattcaaccttacc

SEQ ID NO: 305 - DNA, 547 bp, Rattus norvegicus
  Genbank Accession No. AI009752
aaaattataaaattcttttatttcaattatatgacacttcagtttgcctcaaattttactgaggttttggtcattttgcattccactctaccttgtaacagtagtatgaattcacatgattctgtaacgtgtcaacagcagtcatacagtaatcctctggtgattgtatatgtgctaatacttttagattcaactttacagttattttctaaatgattctttatatagaaaatacatacttccttcaggcagataaaacaacaactttccaataagaaaaatatcgagaaacaacaaataaaaatatctataccagatgcaaaattttgaattattacctaatgggtccctttgcacaagaacagccttttgtaatttttaagtagacattcaggcagaaggataactttaaaattgaaaaaaaaaataatggctgtttctcttcagtactaaagtaggaaatataatttcaacatgtcattagcagagaagagtaaaaaataaaatattcgatataaaatgaatttatcacatcacccgcatcttt

SEQ ID NO: 306 - DNA, 402 bp, Rattus norvegicus
  Genbank Accession No. AI639008
ttatattgctgaccttcatttttatttaaatatattcatcttgagaggaaactacacaggaaatattttatataaatgtaaacatgcatgtctacatcagaattaagcaaaataaattttgagtcacaagattttaaatatcattaaaggacaccaggaattgaagacggaagtgacaggaaacaagaacacagatcctaacccttgagttggtcttccaagctactgggtaaggcctgagtttcaaaaagtttatgttccttgccaagtggaaatatccagtttggctgttcttaatacatatctacaaaacaaacaattctcttttaaaataattaataaatatgacacacacacatacacacgcacacacacatacacatacacacatacacacaaact

SEQ ID NO: 307 - DNA, 562 bp, Rattus norvegicus
  Genbank Accession No. AA818818
tttttttttttttttttacttgatcttttaatgtttaacactttagagacataaattacattaattattttacaaatgttaatgttgtgaaacacttacagtgataatatcagtatttcagaattctttttagtagatgctatgttgtgcctccatgaggtccgggaaggtagtcaccggcgcgctggggcatggcgggatgtagagcctcctaaccctaggatggctgaatctccaggtactcggcaaaactacccagaactggaagtatgcagcagagggctgctggcccgcttctccagccggctgctctgaaggaagaagcccaggctcaggcccaggctatgctaaagggacccaaaaatcacacccttctgcccattaagaccccaactgcattctggccttctctgtatgaagaatgctggcgcccacacgagctgcttcctatgctgtgcacactggtgccctgtgcaccgatcgctactccggggacattgtctgaggaagtctctgttttcccagcactggctcatggcttggactcaggaagcttgacctt

SEQ ID NO: 308 - DNA, 626 bp, Rattus norvegicus
  Genbank Accession No. AI175474
ctacgctgcaaacattttaatgattattgttgagcatacatttcagaaatttacttcaaactgcaacaagttaaataaatgtttataatatacaaagaaaatacaaccaaacataaacattgctgtgagtgtgccttgcacctagaccagtgtttgcccctcttttaatatatctttatttttgagctgcacaaacacattttagaatttcatctttgtagaatggtatttatgaaaaaaaaatatactcccaccttaaagaaatgacaagggtgtgcatgattctatgccgaacaaagagagagcactggacactggcagtgcagatgtcataaagaggaaaagaaaagctgagatgctcattaacactatgttttaaggaagcagtatttttgaccgagtagctaaaaagccagcaaaacgggggtcagtgatggcaactgtagtgtatgaagtatgaaacgatgacaaacttgatacaaacacggttacatttacagtgagcactgaagatctgagaggctgctctgtggaacagttaagtagaaccaccttttccagtcacatgagcccttgtaaagcaacacagtgtcctgtgctggatacctgctggctgggtagttaaa

SEQ ID NO: 309 - DNA, 310 bp, Rattus norvegicus
  Genbank Accession No. AA800844
aagtaagattagaaacaacaagattttttttgaggctgatgagtgcaaagagaaacgctaaacatcagggggccggcaacagacaaaatggtgttgtagaggagacttaggtacaaaacggggtctggcatccagaggccctgtgggtttgggccatgttcactccctgaggccggcggggagggatgccccagcgggcagctgccctcgccctccggctaggcgggtaggcttcttgggggaggcggcctgcaagcaggtcctgcttttcaaggggagacaacgggggctccgtccactgagatcagga

SEQ ID NO: 310 - DNA, 389 bp, Rattus norvegicus
  Genbank Accession No. AA900050
tttttttttttttttttgttgtgtaaattagcccatttattgcagaccaggcaagtctcaggaggtgcttctactggtccttcagttccttcagtcttctgatggcagacttcactgtgactgcagaagtggtattgtaggtccaggccccaccggccactgttttcatgcaggaaccacaatgccagatgccaacggctcgtctcttcatcttggtcttgccacagaaggagcaagtgtacttagcgtgctggctgatttcaattttcttcaccattttccggagggaggcaccatagcgggtcccgtattttccgacgatcccgaccttcttggtgcgtttagccatgtcgccggaaccgaagcccaagcccctcgtgccgaattct

SEQ ID NO: 311 - DNA, 3657 bp, Rattus norvegicus
  Genbank Accession No. D90109
ccaacacagaactatggaagtccacgaattgttccggtattttcgaatgccagagctgattgacattcggcagtacgtgcgtacccttccaaccaacacactcatgggcttcggggcttttgcagcgctcaccaccttctggtatgccacccggccgaaggccctgaagccaccatgtgatctgtccatgcagtctgtggaagtaacgggtactactgagggtgtccgaagatcagcagtccttgaggacgacaagctcttgctgtactactacgacgatgtcagaacgatgtacgatggcttccagagggggattcaggtgtcaaatgatggcccttgtttaggttctagaaagccaaaccagccatatgagtggatttcttacaaacaggttgcagaaatggctgagtgcataggctcggcgctgatccagaagggtttcaaaccttgctcagagcagttcatcggcatcttttctcagaacagacctgagtgggtgaccatcgagcaggggtgcttcacttactccatggtggttgttccgctctatgacacgcttggaaccgacgccatcacctacatagtgaacaaagctgaactctctgtgatttttgctgacaagccagaaaaagccaaactcttattagaaggtgtagaaaataagttaacaccatgccttaaaatcatagtcatcatggactcctacgacaatgatctggtggaacgcggccagaagtgtggggtggaaatcatcggcctaaaagctctggaggatcttggaagagtgaacagaacgaaacccaagcctccagaacctgaagatcttgcgataatctgtttcacaagtggaactacaggcaaccccaaaggagcaatggtcacccaccaaaacattatgaacgattgctccggttttataaaagcgacggagagtgcattcatcgcttccccagaggatgttctgatatctttcttgcctctcgcccatatgtttgagaccgttgtagagtgtgtaatgctatgtcatggagctaagataggatttttccaaggagacatcaggctgcttatggatgacctcaaggtgcttcagcctaccatcttccctgtggttccgagactgctaaaccggatgtttgacagaatttttggacaagcaaacacgtcagtgaagcgatggctgttggattttgcctccaaaaggaaagaggcggagcttcgcagtggcatcgtcagaaacaacagcctgtgggataaactcatctttcacaagatacagtcgagcctgggcgggaaagtccggctgatgatcacaggagcagccccagtgtctgccacagtgctgacgtttctgagggcggctctcggctgtcagttctatgaaggctacggacagaccgagtgcaccgctggttgctgcctgagcttgcctggagactggacagcaggccatgttggtgcccccatgccttgcaattatatcaagcttgtagatgtggaagatatgaattaccaggctgccaagggcgagggtgaggtgtgtgtgaaaggggcaaatgtgttcaaaggctacttgaaagacccagcaagaacagctgaagccctagataaagatggttggttacacacgggggacattggaaaatggctgccaaatggcaccttgaagattatcgacaggaaaaagcacatatttaaactagcccaaggagagtacatagctccagaaaagatcgaaaatatctacctgcggagcgaagccgtggcccaggtgtttgtccatggagaaagcttgcaggcctttctcatagccattgtagtacctgatgtggagatcctaccttcctgggcacagaagagaggatttcaagggtcctttgaagaactgtgcaggaacaaggatatcaataaagctatcctggaagacatggtgaaacttgggaagaatgctggtttgaagccatttgaacaggtcaaaggcattgctgtgcacccggaattattttctattgacaatggcctcctgactccaacactgaaggcaaaaaggccagagctgcggaactatttcaggtcacagatagatgaactgtactccaccatcaagatttaacatgaggaagaatccttagaggaaatggcgcacctccacaatcctcctcgtaccaatggcctttgagttggtaactctgcctgcagcgagtgtgggaaaggaaatgccatgctggacttgtgcacagggtcttaccatagggatagcagagggcacggaacactgccttacagtcacctgtgttgtagcccatgatcctggggatacacagtttccaaaacgagccttaaacattgtaaaggggaacccataaaagtgctaagttatttaagacttcaaccaataaggtgggtgttaaaacttctgtctcctgtttttctaaccaaggggttaggacttactctttctgatacgtctgctgctggctgcacaccctgcagccgtctgctgctctgaagagtacagtacactggaagaaagctacccctttaagagcaactgtccaggctgaagaaagtcacagtggaccagagatttctcttcttaaccccttccccttgtccctttccctcaccactcacatgcagtacatttatgtgacccttctggtttgtaagggttccaaagggtccctgttgtgcctgctggtaacctcgtgtttccagtacactaaagaacagatcctcctcagaacaatgcgggtacccagtctcagaaaaggaaaaaaaaaaaaaggtggctcctgcgttgagccagcaacttgcaggctcacacagatgtcctcagactccgctccatctctgctccctgcccctcccattcttcccaggggttatgagaaaccctgccttagactctgcagtgaagatggtgttccgaagaatgacctggatgggccatgctcaactgtgattcctcccccgctgtccactcgctcgctcgtcgtggaaccagcccgtatctgcagcggcctctgtgctccaaatgtggttttctagcaaatgctaatgtggtgatcaacttgctttgttttctttccctcccagttaaactcaggcacagcatgtcttcagaagtatctaggcagttggtatacgtgggtacttattaaagtggacagtaataagtaaatgtccttattataaaactacctgatttatgtgaaatgcatttgataagccaaaaatctggggtgtagaaatctgggggaaaaaaaatcatatcctgggatcaacttcccaaggtatattttttaagttaatttgggaaatgaacagcatttcactttgccgcgagtcttggccacatttgacctatttgagctgtttatacatttgaagccactgttgttggctgtgtgacagtgtgtgtatcttgaagcacaactgggtttgcactaaagaatcatcattgtaataacactatttggtagcctaacttcattttcgtattcttaactgcacaggaagtcgataatttgtcacaacggggttttgaatgtttgctttcagtgttggctatttctatgttttataaaccaaaacagaatttccaaaaacaatgaaggaaaccaaaataaatatttctgcatttggagtgagtgg

SEQ ID NO: 312 - DNA, 399 bp, Rattus norvegicus
  Genbank Accession No. AA923945
  misc_feature (1)..(399): n = a or c or g or t
tttttttttttttttttacaaacatccttttattgaaagtgaggctgaggaagcttaataatttatcaggcaggggaccctcagaagggtcaatgggaaaatagaagactctagggacctcctgggagggctgttggggccagcacattctgtcccaggcacatagacacactcaggagatgagaaaggcagggtcccctctctctgagaatgacaacccaggtggcccaacaaggcacagtggcagagaaggtttggcagactgattgagtgtcaggggtcaacgaaggacaccatgatgtatcgagttcccctggtggtgggcagcccctcgtggtagtgtgtgaggcgaccagggtgcangagagcccagcccttcctcggggatgagactctgca

SEQ ID NO: 313 - DNA, 484 bp, Rattus norvegicus
  Genbank Accession No. AI012144
attcttaaatatggtttaatactcttctccatttctgtacatcacaacaccgagattctgctcttagggtctctctgcaaaggctagggagtgcagggtacggtttcacccctcacttatgtgtgtttgtatgcgtaagtgtaacacatatcggtatatattgatacacacatcaatatataatgcaatatatatcaccaaggagaacacattgattaaagaaatacaaaaatttggcatcatttccaaacttaaatagtaaaaataaaaactagaaaaagagctgcataccctaaatgtatcatgtgagacaacaagcatatgcaaatgtagtttacatccgatctctctggtcttgtcagtcacatcagacccatttacaatggcaaaaccctaaggtactgctgggaagagtgttcgcttgcttttgggtgttctgcaaacaaacagcagagcccaaagcaaaagcctgctctggtgaagc

SEQ ID NO: 314 - DNA, 355 bp, Rattus norvegicus
  Genbank Accession No. AA901290
tttttttttttttttttggtgctttaaaattaattttatttctctttatatctttgatttcaatctttaaaaaaaaaaaggttcatctgacattgtcttcaagagtctcgcgtctgctggtaagtgcacgcatgggtttgtgttcacagtactgtccgtgaccaaggacggttggtgcttattgctggaaacagtgagtgtccatgcctgggtgggcatgggtgtgaaggaaaagcctggggtctgtcgacagtatgaggcaacgggctgaggggagcagccccagagaagctgggtgctctctcgaagatccacacagcctctctggggttctccccagccctgtcttctgcca

SEQ ID NO: 315 - DNA, 340 bp, Rattus norvegicus
  Genbank Accession No. AI072213
tttttttttttttttttcatactccctacatctttattgagcaagcatatatccaaggttactcctgtgcatctacggccagtttggtactaggagacggccacatagttattatctgtattgttcacaaattacaaaacttaaagatgaaatgtccacaaggattgtcaagacagcaggtgcttctgtgtccaagatgccagtgtctaccggcatcaagatagttgtacaatctagtgtagacatactgctcacaaggatccaagctgctgttttggctttaactggcagcctcgtctgatcaccagaattagctgtttctatcctttaccaggagcca

SEQ ID NO: 316 - DNA, 471 bp, Rattus norvegicus
  Genbank Accession No. AA866345
tttttttttttttttttagctttgaaaattaataaaatggttttatttcatatatgcaaagtgaaaatctctttgatcacttacatttttacaaataaaaacaacaatactgctccatataaacttctgtataaacagcgaagaaaatatacatattattttttccttttagtgcttccaaagcacaaacatgtacaagtccacctgaaggctttctgttgtcacatgcaggaacagatgtcagaggttagtgcagcctcagacagagtggaagagcactcgaggtagacggtttgctgactcccctgccctttcccagagagaagtaagttaccgaaatagcagcttttcactctttcattccaactatcctgaatattgcatggtttaaaaggcacagctagggattgttgaaaagttcattgagcacatgatcaccacgtggactctctatgcttatgagttctatag

SEQ ID NO: 317 - DNA, 550 bp, Rattus norvegicus
  Genbank Accession No. AI177372
gccaggcaggcctgagcaatctttattctgcagaggaaatgaccacagatccacataccatgtcaggacaaggggagccagcctttcaggggtggggcaggtcctgtcagggggcaaagcctcaggtggatgaggggcaagatgggtagacaggcaagggcctaaaaaaaagacaaaccccacggggcagggatgctgctccccacccactcccaacccagccagcacccaaaagagcaagcctaacaagactggcccaggacctacccaggacttggtatgctggctggtggcccctacctggggggagggggtgtcacatctctgcctaatccacccggggccgaaatagcttagtttaggaggcaggaccttcctggggagaacctgaccagaactcccagtcaccccccaccccttctcttgactcagaagccgaaggtttcttgggaggcatagaccatgtagaggaatccgtgttcatccttctcctgttcatagatgtcagcgatgggtgtggatacacttaccatgctgtgctggttcacca

SEQ ID NO: 318 - DNA, 465 bp, Rattus norvegicus
  Genbank Accession No. AI229753
cagacatccaggagtacatgaccatgtctcctacttcccaagtaagttctttattatctaaccagtcaccaggtttactgcagcctagcaccaggccaggcacactaagcataattacaaagggcaagaggctcccagccaatgggaggtgtacaacttaaacatttctcaggaattcatctgacgttaaaaatcacatctggactcagtcaccagtattgcaatgaacattcaagatattttaaagaaaaacatcacagctcacatttacaatggcatggaattttttttcctagcttaactttgttaccaatgaacaagatttatttgaagttcagtttgcattcccccttctgtagcaggggttaatttttttctgaaaggagttttaaaacattaagcagtaaaggggcttaagtacaaatgtggcccagagctatgtggccagaagggcttagggctgaa

SEQ ID NO: 319 - DNA, 681 bp, Rattus norvegicus
  Genbank Accession No. AI172489
tttttttacaggtacacaatttaatatttattatatgcattttatatacattatttttcaacagctgtgtgtttgctctgtggtacaatcttaaaaatttgctgattcatagtctgtaaaacaaaaaccttacaaaactcatcaaaactcgcaaactgatcagaaaaggcttttggaagactagaaaaaatactttattgtcttaatcatgcattacacaaagaaaatcttcagttacaccataaaagtaagcacatctaaaaaaataaaacagggaagactagtccaaatccagcagacttctgtatcctgattcaagttttttaaatatcttatttgtaatggtaataaaatatcctccaatttttttttttaactagatcattttgttttggaatcatggtaaatcaagatagtatcttggggagaaacaccttggtttgtaacttaactataaaatattccatttttagtctattttagactgttcaacacgaacaaaatagattccaaaatagatatacaggttcctttagagcattaataaaaggatataaagaccaacaaaaagtaaaataaataataggccattagcaagatggataatccttgataaataaacttgtaaatacagtaagatgtacaaaatatcacatagtgataggatgtcaagattagttt

SEQ ID NO: 320 - DNA, 504 bp, Rattus norvegicus
  Genbank Accession No. AI168973
aacttaatttatttgcattgtgtttttaaactccacattcctttctctatagttgcatgtcaaaagatactaaacagtcacagggtttgctgaaacacatgtaggaaaacatggatatgtgacataagagcttaaattcttaaagaaacattataaagagttccaacaaatttcttaaaaaatttcagcaatgattatatctgaaatgtataaaatttaaataattataaaaaggttaaaacccaaaaggataaattattgcttttccctccttattgaaactccagacaatgcgtcttatcaagagagttcgaaaggctgcatcactgctatcttagtcgtcctcggaatcactgtccctcctcatggggacagggtcccgcactgaggacagcagcacgtctttgatggctttcttggggttctcctacagctctgtcttgattgctcctgactcagatagtttccactccaactcatctatgcctcgtgccgcctcgtgcc

SEQ ID NO: 321 - DNA, 489 bp, Rattus norvegicus
  Genbank Accession No. AA945996
acacaaaacagtttttatttgatgaaccacagtgactaacaagatcaggaaaaaaaagcgcattctgaaggtgggatgggggtggggaagagagcctgcctccgctgctgtctgtcccagtcatggttgagattcctgtctcccagaagcctcctacagcctgtactggctgctttgaggatggcctggcagatgaagacgctgtgtgaaagtttctggcctgagacatgcagagctcagctaagaaaagctgttttctccatcccccaccaccacaacccccttttctgccccaggagcaggatccctgccagagatggtccaactgcatcaagccaggctcttcctgtccaatggcacatgtcatgtccttggtttccagagccctccaagaacaaaaccggaatacacacacccatttccagctcacagaggccccgctattaatttgatccctgagagcccacaacggcttcagtcactctttca

SEQ ID NO: 322 - DNA, 667 bp, Rattus norvegicus
  Genbank Accession No. AI179988
gaagagaaaatctctaataatttattgaccttcagtttcacatcgtgaaaaaaaataacagttttacaaaacctcaaaaatgtagtggaagcaaacaacatacgaacacgaccgtcttctaacttctacagggtttggtatgtgaaccacatattcaatagccaagagagggatattatgcggctctaatcactcttattcagacaggtgtcaagcctgagaaaagaggctccaccattatgccagaagtggaaggctgccctttgttatccgtttccagggcaaccggctcacaaaataagaagaacctcccctgtcttatgccagggtttttgtgtgtactgtgctgtgaattgtatttgcttcaaagtgtgggacatttcacagggcgagaatggtcaagtagcaggcccgaatgcctagatcaattgaatgagcggggagtctagaaagttcccctgccggctgggggcccacccttgctgggcagctccctctggctcacacagtaattaacagaggattcaaggccgggccacaactttgaaacagctgcagagaattctccctgctctcagcagcagtgacgtgaagatcttgagacagatttgcattgtaaactgtggagctgagacagctacgagacaactgatcataccaccagggt

SEQ ID NO: 323 - DNA, 469 bp, Rattus norvegicus
  Genbank Accession No. AI237002
taaatacacgtgtttttttgttgggtcacagggcataggtggtgctgtacagagctggtataggcgtggggtggtgttacagtggcactggattcagcttatgtcattcagggcctgtgtcagctgctgcacgggctcccggaagttggtgctcgggtttttgctacacagcatgaagccgatctggccactgggataggtgggaatggtacagtaggcatagctcaccacagggaagagagacttgcagaaatgcctcatctccttgatgaggtccaggtgcagccactggcactcgccctggcaacagaggatgccatcttctttgagggctgtcttcatgagctggtaataggactccttgaagaggctctcagcagggcccatggggtctgaggagtcggtgatgatgacatcaaaggcatcttggttctgcttcatgaactcaaagccatcgcccacgtggaga

SEQ ID NO: 324 - DNA, 595 bp, Rattus norvegicus
  Genbank Accession No. AI105435
aaggcacaggctctttattttcctcttttatctgcttagtgttgaacacagaaggtactgctcctgggatagaggcaggaaggctcactgtgaagtccactacaccttctcacacaaggtctgctccgtctcagtggcttctgtgtcactcccctttgtctcttccagttccaaaaaacttaaaacagggtagatggagtttgatttcatccacagttaaaaagcactgagggccaagagccacactgagaattaatttcttcttctttctatagagcatatctgaatgaagaaagacatttcctaagtctcaaatcagtgtctcactttcaaccataaaagctgggtccatccattacttcttgagcaaagtatttctctgttgaagtgggttcatttttcaaccgtgaatgcctgaatcccagtaattgctctccccaggatcagagcatggatgtcatgtgtaccttcgtaagtgttcactgcctctaaattcatagcatgccggatcacatggtactcatcagaaatcccatttcctcccaggatgtctcgtgcctggcgggcgatgtccagggctttcccacagttgttt

SEQ ID NO: 325 - DNA, 635 bp, Rattus norvegicus
  Genbank Accession No. AI103465
tttttttttttgcctggggtctggttttattattacttgaataactgacttagctagaatgttcaggatacacagagagaagtaggaaagacagaacctaaacgcccttttcttcagatgaactaaggttaatcctggggtatttctgctagtctttcctccctgtacaactaaagctaactttagttagctaaaaatacaaatatctacccctagctttctcttgcgttgttcaatattcttcagcccctgttttccctggactagaggcgggctacagccagaggttcttcaaggaaaagtgaacactcagggtgtttccagttctcaggtgtcagggacatctgtctccagtggcaaagagttcataggtcaattgttccctttgctttgaacttcttggcagaccgctcacttgcccgaagctggaatttgcttccataaatgtaggaaatgaagtcatcaatttctatggtgaacacacaattttgcttagggataactttcaggtggtcttctttggtgatgatcttgaagacatgcttggtcttctgcagaaggattcccgtaactcccacataggaggggcacttggatttcgtgactgaaataacagcgccatgaagatctgcctt

SEQ ID NO: 326 - DNA, 447 bp, Rattus norvegicus
  Genbank Accession No. AI013098
ggaacatgaacaatataagtatttatttgaaaaaaatcattttccatttcagtaaaatggcaaatcagctttagcagtttctcactactaattctagttcaccctcacagttgctttgtctgttcatattcaacgatatcattacagagaactgtttcataattttttttctagaaaaaaataatacagtctccctaatgggtggttaattaaaacaataaggctgggtgaaagaaagctaaggtctgaaacatactgacatgaacacgaataaataaataggtactgaggagacactgcccatgatactctttacacggtaagaaacagtgacaagaatggaggttagctcacaagcctacgctacgactcgaacacaacacagagaaaagagatggtgggaagcacgcaaccagagtctacattggtgctgttttaaagctgtgt

SEQ ID NO: 327 - DNA, 429 bp, Rattus norvegicus
  Genbank Accession No. AI639402
ttggagcagaattacccacctataatatccaagaagcagaaagaagcatacaagtggctaaggcaagatatgcctgttagagacatgatcccagtggctttctttctccagtcataccacactgttagtagcccatacatgaaactgtgctggcatgatccagtcacctctcaataatgacaacagatacctttaccacctaggcctgttggagggatagtttatctctacaccacaacacactgttactataggggtattcatatagccaacacatagattattgccccttcttcagagaactgagtcaacctcttctttggtgcccttctccagggtctatctgctcactcacatcacaacaaatacaagtttaaaaacaaaacaaaacaaaacaaaacaaaacaaaacaaagagtatatgagtgac

SEQ ID NO: 328 - DNA, 337 bp, Rattus norvegicus
  Genbank Accession No. AI044467
tttttttttttttttttcaggtgcatacattttagtacagaggcacgctgcatggccagcttctctggcagtctgtgcagggcgtatcaccattcacggtaatcttggcaattgtttctcatcacaccacttattgtggtcatctacgcctgtcaggctgatcctcacatgggactggttgtaccatatctggtaggttctgcagtcttagtacgcctgtgcaccctttttgcacggttgcctatacaatcctcggttgcccatgcattgaacggtaagatttttgcctgaccacaagaaagaaagaaagatagagggaaggaaggaggaaggagga

SEQ ID NO: 329 - DNA, 574 bp, Rattus norvegicus
  Genbank Accession No. AA943738
cactgaacgtccaaattctcaacaaaactgcacgtgtgagactgacggcttcattccatttgttcttctgtcggctggtataggccactaggttctcagtgtattggaggatcagttttaagaacctcagatactgctgtcgttcctgagcatctttaccatgaacagcatgaacactgaccaattccagtgcaaggagcaacaaaatcagggaaagcacaggacacaaaagtccaacattctctgagggaagaccgtccaagccatttatagcgcaggcactcgcaggcaggtagtggcagagctcacacagaatcttgctaattaaagagttgcaggcacatgcttccgaattaccttccgatctgcctgcttcctgacagcactcttctggcaaaggcagcacaggccacatcctgaggcttttctcacagctcagcacctgtttttgcagctggaaagctggatggcagcgagacctgtaacgttctgcaagactaaccagcaactgtattgctgcttcctccacagcatgtccaaagacatgtgcaagctctgcagatgcaagaagatc

SEQ ID NO: 330 - DNA, 493 bp, Rattus norvegicus
  Genbank Accession No. AI229843
aaaggtgagtcaagatacacagctttaatacatattagaaatatccaatgtgccaccaatacgattcccctaaaacacagcaagtgccagcgcttggggccacactcatctgtctttgtatcactagacatctgaatgaccaaccatccatttttcccacatcctgccattcattaaggtattttcagccagattttttagcaatatgctttttttctttctttcaaatacaacaagccacacaggagttctactatgaatgtccaacaacaacaggctgtatggggccaagcctttctgaaaaacatgcgatctctaaaagattctctgtcttccctttatgagtcagcagtgctccacgtcacaaaaatcgctgctggtcacggtcttctctcacaagctcatatgttctcttcatccaacattttgttgatgccgtcacaaagtttctgtaagtgaggtttaaattttccaaagggattatacaaggcag

SEQ ID NO: 331 - DNA, 104 bp, Rattus norvegicus
  Genbank Accession No. AI009950
ggcaatgcacacctttaatcccaggtcttggcataggtaatgagtctgaagccagcctggtcaacacagtaagttctaggacagccagagctatatggtgagac

SEQ ID NO: 332 - DNA, 511 bp, Rattus norvegicus
  Genbank Accession No. AA858953
tttttttttttttttttggtttttagcgactgttcgtttattggttagtgggagtacagcccatcggaacacacgacatgcatttgggggagagcaactgtgcactgcagccgctgtaaacctgctgagtgtgcgagcagcgcagacggcacccacggaaaaggcagggatgacttagctgtctacggtggctaagtgcaaagtctttgggaacagatttactttttgttactcaggaattacatcaaagaggaaagccctaactgccccccgttcttaaactaaaggctaagggggttggaatcatttgataacccaccatccaaatcacgttcattgcaaactgtaatccaattccccttcattaagttttccctgtcaacccatacccctcaggattatacacactgtatgagttcagaaaagattaatgtgaatgtaaggggtatgtattcgactccagcatctttgtcacatagccaatttcttttaaatgtctgctataacagat

SEQ ID NO: 333 - DNA, 533 bp, Rattus norvegicus
  Genbank Accession No. AI008988
aaaactctgataaattaagattcataaaaaccactcttctccgcctctcttcccttgtccggcttgcagatgggctggcttggggtgccctctggtggcagcgagggaaaggtacagtctggggccagcctggggcttgcggaccacacctgggtgcatgtaggcccccttggcttttgctttgggtacttgtctcttggcagatggcccagagcttcggaatggctaggttacaccacaagaagggtctcattcccaactccgtgggtgggttctcttgtcacaggtttccgggtcattctgtaggcctctttaatgagatgactgactccaggcttttagacttcagtggaaaacaggatgctctgtctcttgctgtcaggggcagggatggcctccagctgcaggaaatacagcaatacttggacctgggacatgacctctagggaccagctgtcagtcatggtgatgggctggctggggttagcagggagcttgctctccttctccgagggccgaaacagcgtggggcc

SEQ ID NO: 334 - DNA, 422 bp, Rattus norvegicus
  Genbank Accession No. AI175789
gacaggccagggctagaagggtagcacatgtctgatttattaaaaaaaaacacacgagtaacaaatcaaagctttaggtaggaatgatttggaaaagaactgaaggcgctgatccacaaaacattcacagttgtgtgctagagacagagcgggggcggggcgggggtgggggcggggcggagggtgggggcgtgacttagaagcatttggcccattccaaccatcactccctggtgtctgggacgtcccacgatggatgggaaaacagccctgggagcatcattaccagcaaagcccgccttacagagcccggagccattgtcacacaccagatctgtgctgtcttcctcttcacacatagctggagcagcttctcgaggttcctgatggcgactggctgggcttttccactccctcgtgcc

SEQ ID NO: 335 - DNA, 283 bp, Rattus norvegicus
  Genbank Accession No. H31620
gagagcatggctcagcgaatggtctgggtggacctggagatgacaggattggacattgagaaggatcagattattgagatggcttgtctgataactgactctgaccttaacattttggctgaaggtcccaacctgattatcaaacagccggatgagttgctggacagcatgtcagattggtgcaaggagcatcacgggaagtctggtcttaccaaggccgtgaaggagagtacagttacactgcagcaggcagagtatgaatttctgtcctttgtacgacagc

SEQ ID NO: 336 - DNA, 394 bp, Rattus norvegicus
  Genbank Accession No. AI010542
ctttctttgtgtagactgtgggtctgtgtctctttaattctggaaaaatgttctccacttagaaaaaaaatgggcttcaaatttggtaacaaaccttatttacaagagacttttagctgtgaaaatgcacattcagactagcaggagaaaaataacaatgcaattctttcccaggaggcttcggtgtctctttgaaaatttaaattaacacaaagtagcaaaccttgaattaaaaaaaaaaatcactgtataaaccttatcttttaaaaagtctcctcaatatttttttcattctatgacattctacaaatccttgacttttttttaaactggagacattatgccctagaatttccttaattgcactttaaatatacttgaatttacccaccct

SEQ ID NO: 337 - DNA, 146 bp, Rattus norvegicus
  Genbank Accession No. AI070073
tttttttttttttttttctgattatagacatttattgaactcacttattgatttgacacacttccccactccaatctagcacatgatacaatctgggtaggccaggcgctgacacaggaaatgatgggaacccacagcaggagtgg

SEQ ID NO: 338 - DNA, 560 bp, Rattus norvegicus
  Genbank Accession No. AI232047
aaaacaaaactccatttccatgcttctcaggttgtaccatcattgggcataaaaatcagtcaacatttgcaaggcagtgtcactcacagaatcacccagtgctattttacagtggtcattctctttacaacaatcaggcattgctttgtacaatgggcaaacgctataacaaacgccttccataaacagttagccctttagctattgggaaggtcaagagtcgcttgaagcagtcactggtcgcactaaacaaagtaccaggtggcagctatcaagcccctaaaaagtgtttttaaaaaacagatttacatcccatagtaagtcttagaaacctcaaagatagggcctatcatttcaaaacactacggatatctacggataaaaatctgcattcaactgtgcagcgttttcttctagatctggattaaaacctttattatttaccccaattagttcctctattaattctgctactctcggttttaaaaaggccatggttgccagttgatcttccacagaagaaaacactgcagcccgttccctgtgcttactttcctgtg

SEQ ID NO: 339 - DNA, 423 bp, Rattus norvegicus
  Genbank Accession No. AA925335
tttttttttttttttatggccactaattgatattttttatttttataattaaaaataatacagtgataaaaatatctcctgccttcaagaatatgaatttaggtaggagagatggctcaagcatgtaaagaggcttgttggcaaagctgaccaccagagttgtcaggacacacgtccatgttggaagtgaagagctgcttcccacagttgtcctctgacctctacacatgcacaaacatacaaaataagggaataagtaaatgaatttttaaaaaaatttaaatatgaacttagattcaattccaagtgaacatttgattttcagtcataaagctagtgataaaattgttggacagtagcatgtataccctttaacccagggagtccttagacagcacagtaacttagacttcctagtactca

SEQ ID NO: 340 - DNA, 518 bp, Rattus norvegicus
  Genbank Accession No. AI175421
ctacaaattttaatatgcatctattaaaacaaaaataattataatcacaatagcagagattgcttttgaaaatactgacacacccgaacacaccatcctcagctatgctgttagaccacagaggcctacagtagtagcaaagtagtttatcccatcttatggctgactggagattgctaatgggcacagagaggacagtccccatcgagttagtccaatggcgtgggacatgcttcagaagactgcttcaagtaaaagttagaaatcacagaacacaaaagccctcggaaaggttttctttctttaaaaaagatactataaagtgagagaactattcttctaaaaatgacctgacatcaactttttttttctgtttaaacagacagaagtgattcacatgttttaaaatattttagaagcccttcctcaaaacttcccaaggcagtttgggatgtggtccatatgaaccaaatcctgggaggacgtagcaccaagcacagggttccggtgctctttgc

SEQ ID NO: 341 - DNA, 4359 bp, Rattus norvegicus
  Genbank Accession No. U25281
gccaggcgcgcagaagcaacgccaggcactgccggcagatcaactgggatcctcgaggcggcaagaggacagggacagcggggaccgcgactccagtaaaagtccagtcggcccggttacggccagctgcagaccagaacctactctcttggagccatttgtaagcaagagacgccaacgctgtgtgacatatgccggtgccaccaccaccacccccacctcttcctccaccccctccacctctgggagctcctccccctccacccccaccagggcccccgatcagcacagacgctcccagcttaaggaagtcagatctgaaaggtcggagtgcactgttggctgatatccagcaaggaacacgcctgcgaaaagtcacccagatcaatgaccgcagtgccccacaaatcgagagttcaaaaggaaccagcaaagagggaggagctgctggcagcaatgcccgtggaggaagcacgccccctgccctgggagatctctttgctggtggctttcctgtgttgaggccagcaggccagcgggatgtggcaggtggcaagaccggacagggccctggctcccgagcgccttctccccggctccccaccaaagccatcagcggcccccttcccgctcctgcatcccccaggctaggcaatgcctcagatacacacagctctgccaggccagtccctcctcgccccagtgtacctgccccaccgcctcccactacacccccacccccgcctccacctccacctccacctccacctccacccctccccccagcctcccccatcaaagccccatcggtgtccccacctgtccctccaaccaaggggaatccgtctgcggtgccagcccctataccctgcgtacctccccttccgccccctcccccgactccgccccctctgcccccagcctcagcactcagtgagaaggcagtgaggccccaactagccccgctgcacctgccacccataccacctccgcttcctctcctgccaccctatgggtacccggcgctccactcagagcccagcagccctgcccaggacgtgagagagccaccagctcctcctccaccaccgccaccaccaccaccacctccaccaccaccgctccccacctacgcctcttgctctccaagggccgctgtggccccgcccccgccccctttgccaggctccagcaacagcggcagcgagactcctcccccgctgccccccaagtcccccagcttccagacgcagaaagccttgcccacacctccaggtgctcccggccctcagatcatcctgcagaagaagcgtcgaggcccaggagccggtgggggaaagctaaacccacctccagccccacctgcaagatcgcccaccactgagctctccagcaaaacccagcagcctggaggacagctgcggaatggaggccagcacgtgattggccgcacacctggttcctggctccaagctgaggcagctgggcagagctctgatgacatcaaaaccagaaattctcagttatctctaaaggcactccggtgagaagatggtgacgtcaaggtcctggggttctggactagacaccaggacaactccttgagactctactgtactcaagatctactcctttgaatgcaggcaccgaactgagcatttattttttttgtaaataatgatttgcatgaagcccttaggcaccatgttagtcaactttcatttgagtaacattttaatatttttaaaacaagcaccctgacatttgtccgtcttgtacagatggctcccgatcccgccctgtggtgtccactgtgactagaacatatgcttgcaggctggtccttcgaggattctgaaaccttttccagagcatccttagttttcgagtagtccaaaagtcataactatccacaacagcttcttattggcatgactctcatcactccaaccgcaaaatcaaaccaaataatgccttataaaccacgcagctcagaggaagcagtgtgtcgccaggtcctggtgttgccactcagcttccagtgagcgagaagccatgtctcgcttccttttagcagtacagggacgtcattttgctgcctaatgtgtgtatatatatatatatttatatcccaaggtaaaggctagagtgggcgtggcccctcccatgccttccgcagggccccttttgtaactgaattcttttacaggtagccaatgctcttactgtttacagcatccccagcgccagtctttaccgctttccttcaacacctccaagttcccagctccatgctggtagccagggtaaagtcagctttatgagattttgatatcctcccatccctgtagactacggttgtatatagctcatgattatgaataagtttatttttacctcagaagtctccctccccaaactctactcagagtgtaagatttacatggaaaatacaacatatatttaaaaagaacaagaataaaaggaggctggagaaatagacccactggtaacatgcctgctaaggacatacacacagagctggatgtggtaacacacacttgttattccattactgggggagcagaggcaggcagatccctgtgactcactggccagccaagctattcaaggagcctcaggttccagaaagtggcattgtctcaaaatacaaggtggcaactcctgaggccacaacacccaaagttgacctctggcctcttacaggttcacgcatgacatgtgtgcacacatcccacacagggacatacacactcatacagaaacacatagcaaagagcagagcagctcttggagcatatctcaaatatcctgccccattggtaggagtctcagaatacccatcagcccaaaggaccttctctctgagcttcatctgagagcgcagatggctctgttgcctggtggcgtgtgcctgggatgcccagcagtaataggcagcgagttcagctgtcctgaatagacagagggccacgcaggctggggctgctctctgcacccttctttgaatctcaagggagaaaagtatgcttttgcttcttgtcaggccccaaatgctcccatccactggagaggggaggctgtagcagaggagggggaaatgggaggaaacagtccgatccctcactgtattcagaatagctgcagacagaagagaggggaaatgaaacaatggtgttgctttggagcactccgaccacaagaacattagcccaggccgggccatcaggggccaatggattaggagagtgttcagctgtgtgtctgcacacacctgactattgtttggagcaaatgtcctgcattagtgtcatgctttctcctgccagataggagaaactgagccagggtcaagtttccaaaatctctggggcagtgactcaaggccgtagttacagccacatcagcagacatgacggttctacgttgctggtttgttacggtggctctggaagtgtgcagaaaggtcagaagccacactactcttctcctagccatgcagagtaataatcattaaaaagctttcataactacgatgagggccatcaggaaggcagtcctgcctttggaatcagtgaattgttcacatacggtgtatgttcaccatgtattcacatggtgatgttctatactgctggcacaggaatttaaactattcaagagtgggggagatgtctctgtctgtagacatcctgctgcccaagcatgaggaccggaattcatatccccaggacctatataaaagtcaggcatgggggaagcatgtctgtaatcctagaagttgggtagaggcatctgccccaggaaggtcggtggccagccaacctagcaaaatttgcaagttgcaagctgcaggtttagtgagaataagatagagatagaccaaaaaagatacctgtagatggcctttgggcttcacatgcatgtgcacacatgtgccttgttcatatgcacacacacacacacacacacacacacccgtatatataatacataaatattttttacaaacttatttaagggcataaggaaggaacaagcagaaaccaaaaaatagcaagcaaggagcattctcagggatctggcctagcagctctcctcaagacctgtcacggagcctaccacctccaagttcaagtgggtacgttcggttcccaccagcagtgtacaggttaggcctttgactgtgaactcacgcatggagttgtccctgctatccttgcccacccccacattgcagactgtgaccctgccccatgtctctgcctgtattttatatttattggtgtctcctgctgcagattcattcctttgtacctaataaactttaataagtga

SEQ ID NO: 342 - DNA, 437 bp, Rattus norvegicus
  Genbank Accession No. AA945636
cacaggttcagctctttattggacatgttaacaaaagcagtttagtcaaaaagaccaaagcccatgtcatcctcggattcttcagattcttccttctttgcttctactttcttctcctcagctggggcagcggcggcagatggagcaggaccaccagcaggcgcagccccagcggctggagctggcccaccagcccctacattgcagatgaggcttccaatgttgacattggccagagcctttgcaaacaagccaggccagaaaggttcaacattgacaccagctgctttaatgagagcattgatcttatcctccgtgaccgtcacctcgtcgtcgtgcaggatgagggcggagtagatgcaggcaagctcacagacagaagccatgttgtggactgccggcacggtgctagtcgccggatgaaatgagggcccctc

SEQ ID NO: 343 - DNA, 214 bp, Rattus norvegicus
  Genbank Accession No. L13025
acctagtgagtgtaaggccagcctggaatcaataagagttggtttcaaagaagcaggaggagaaggaggaacaggaacaggaggaggagcagggggaggagaaaaaggaggaggaggaggaggaggaagaggaggaggaggaggaggaggaggaggaggaggaggaggaggaggaggaggaggaggagaagaagaagaagaagaagaagaagaa

SEQ ID NO: 344 - DNA, 285 bp, Rattus norvegicus
  Genbank Accession No. AA955948
tttttttttttttttttgagtttttctttctttttagtttatttttatttctattatcctttttccccttgagacagtgtttctgtgttgccctggctcttctgaaactctctgtagaccaggctggcccggaactcagagatctgcctgcctctgcctcccaagtgctgggataaaggctagtcctgtccccaccaagccagtccctgagttctttgttctgttgggcttccagtcagctccccttttaacagggcttacaggctttcaccaaggaccggaagg

SEQ ID NO: 345 - DNA, 250 bp, Rattus norvegicus
  Genbank Accession No. AA799448
aagcattttcaaactttatttacaactgtcacagtgacaaaaagtagtttggaaaaaaaaaatgctagtttctccctgagcctcgatacagaacagacagaagtcacaggaggttcatctcacaacaggcatgtcactgaaatactaggattttttttttcaatacgatcagttagaaatacacacaaattacttaaagaaagaagaggaggaagaggaagaggaggggaggaggaggagagggaagagg

SEQ ID NO: 346 - DNA, 498 bp, Rattus norvegicus
  Genbank Accession No. AI104213
attaataacagatatgtttattattacatatccatcagtgcggctttcaataccacttgaaacatgcatgtcaccctagagaagatcggttttccagtgcttacttgatacacattactgcaaagccgttataaattactgaggaggtatttggttaaaaacaacaataaatcacaccacccatacacatcaactcctgttacagctgaacagagagtcgaacagtacttatatggtaattcctatgttaaatggaaaacatcatggacatatttcataattctttactattggtgcaactgtatgtttttgcagatagtttcactattgtagcagatagtttggtacaaaggttgtactcaatttatgtaagtctgacaaactatattttaaattaaaccaattaccaatgaaaaaacataatttttgtaaaatctgttttctgaaaagtctgtacttatggcagtaaaaaaatctctcaaattaatcactaatagg

SEQ ID NO: 347 - DNA, 572 bp, Rattus norvegicus
  Genbank Accession No. AI010256
gaataaacaagtttatttgtaaatttagtcaacatacataattgacctaaaaacttcaataggatacttttaaaaaccacttgaaggccatctctataaaagggatttttttgccaggatagtaaccaggtgtaacctaacccatcttcattggcagagtccaataagctcaagctgtactcttacccccatgtttataaactccacaaggaaaagcaaaccttgtacagttttcccccttaaagattaaaaacaaaaccaaactcagtctaggtgtaagaccaaacacaatgaaaagctcactaactagattaggaacagatgatgctggtgtgaatagcttgttgttttactctagagcccttaaagaaaatccccgttagtgttttgtgttaccagccagagggtcaggggttagtgaacatgtggtagaatgaggacttatgcaaggtttaatacgcatagcattcttctactttgttaaaaacaaatgcagtctagtcagaaataccaactggactaaattacacacaccttaatgacaagactccccaccacttgtgaatgtaaaa

SEQ ID NO: 348 - DNA, 473 bp, Rattus norvegicus
  Genbank Accession No. AI073212
tttttttttttttttttgtaggttttgcgctatataatagcacaagtattgtattttatattattttctcttaaaacatacaaatatggtacaatacaatttattttaataaaatgccaaccggtatagtacaacaaaaaaaatgaatttaatacattaaagatgcaatacattataatattaaaataccacacaggaatggcagtacccccagggccccaatgagtacagtgtttgtttaatgaagtagttattcagtcctgctgatgtggatacattctagtgagggcgtggggattggatcagggcctcgagcccaagggaaaaggacagaaagggtccctacggtctctcccccggaaccctccccaaagtccacttttccccatgtcggctgcaaatcctatgaccgacatcccaagggtatcacttacatattctgcacccttgtctgagctttctctgactagatt

SEQ ID NO: 349 - DNA, 435 bp, Rattus norvegicus
  Genbank Accession No. AA955042
  misc_feature (1)..(435): n = a or c or g or t
tttttttttttttttttagatgtgtcatagatttattgaaaatgattgttgtagaaaccccaagccccaacatggatcaggaactggatggcagaggagaggggtggaagcaggctcaagacttccttattctttgaagagttgaaccaaccgagaccaagggtagctagaggagaagactggcctcagtcagggagccataatgacagcactggggccaggctgggcacaagaagtattgctgcatggtacacagtcccagatgtcataaaggaagcatagaacttcaccacttcctcattgggattgccctgggttgagtcaaaccacatctggatgcactggccactccctctgctatagttgctgaccttgtangagtgactccagagaccctcacaaaggctggctggtgtcgggaaatagtactgaaat

SEQ ID NO: 350 - DNA, 675 bp, Rattus norvegicus
  Genbank Accession No. AI230381
cttgtagccaacatattcaaaatttattcaatttttatcacaagtcatgtggttcaaaacacttcaattttattcaattaaaatgaataaagtaagtcaacttttcttaaaacaaaacttttaaagaatattctaccattttacttaaggagctcagtaaatataaatattaaacttcaatataaaactttatatataaacaccttaacttttttttaagttgtactttgcatctcttggtaatcactgagctcatgaaattcaaagccatacaaatccttacattaacagtcataagcttgaaactcttaaaagagacgaccttgatcaaagctttggaatccagtaaaaattagaaaacgagtgggcttcagaataccctgagcgtacaccagcacttcaccaggaaacatagtcgatcttctgtccagaaagtggggctgacagtcaaaaagaaaacagaaggggaattaaggagcaagtaaaattctggctttattacacaagcacgaaaacaaattcctttggagaaaaaaattgaaaaagtcttcggaggacttccagaccggtgaggtagagtccgagagggagaaaatgcacgtgtccctcctggttctggagacgtctccatccgggttgggaagcaaagagacttctgtcacgggtccggccgtc

SEQ ID NO: 351 - DNA, 318 bp, Rattus norvegicus
  Genbank Accession No. AA851660
aaaaaaatagtttaataaaaacgcactaggtaggttctacaggcagctttcatggtcacttctgaaactcgctcaccatcctccaaggaaacaatgctatgtcctcctgttaaaaatggagtccttgtgtcacagagaagtagctgacagtcaccgggcacatctccctgtgtgcatatcgtcaatatctctcagcaccatcggccttggaggatgttgcggtggaggtgagaaacgtcctcatgctgacagaagctcatcttcgctaccacggggtctgcgtgagagcttgacagagaattctaatgtcggagtcag

SEQ ID NO: 352 - DNA, 717 bp, Rattus norvegicus
  Genbank Accession No. AA942704
tggtttgacaaaagttttctgaaaatgctttagctttatgtgggaataggtataaacctcatttttatgctgtattttatatcttagttgtgtttgaaatgttttgatcttaggaaacatcaaaataaataatggcatttggtgtacagtgtggtcctatgtggtgaccagccagggctggggacctggccaggctcaggatgctacagtaagctacagcaagggtcactgaacactatgaagaaagccatgcatggagaggaatcttcaaccccgctgatgccatcttctgaacagaacctccaggcccactctggacagcagccagtgtcaggacatcagtggccagttccaaggacacccaaaggctttctttacaggcttcagcgccctagctgcttaaaggaactgaagttcttgggcttgtgatgatggcttttgaacttcttggtcaacggggtgagctccttcttcctgagtttacggcccctcttgtggcccactttggcttctctctgtgcagtgctcttttctgactgtttgggcttctcctgttggtctgtctgaaagtcttcaggcttgagcagttctctctctgtgaacagctcaggtgggtataggtctgtcatgctgtcatcactcaaggcgcctccctcgtcactggaagttggttcccagaattctgttctctggcctgggaggtcatcgacatccatc

SEQ ID NO: 353 - DNA, 349 bp, Rattus norvegicus
  Genbank Accession No. AI170842
ggtctggtgctccgggtcgggtgcccagctccgggtagatatttactgggctggtacaggctggggtgtctcccggccactcccaggcctctccaatccgttctgctctgattctggttcagggtgctccagggcatgccgggtgtctgcttgccacagctggaccaggtcggtaggggtcttccccgccatattcttagccatcatgtctgccccatgcaagagcagcagtttgatgattttgtagcggttgagtctcacggcatcatgcatggcactgtccccttctctgtctttggcattgatatccaagcccatggagagaaaatgttccacaatcttcacgtgt

SEQ ID NO: 354 - DNA, 536 bp, Rattus norvegicus
  Genbank Accession No. AI144653
tttttttttttttttttccaagacaaataaaactattttttaaaaaagtctcaaagagtccatatgatttaggatagagaatataatacatgtatacatcactggtttccgatacaggtcagaagcggtcacactgacaggaagcgctgacagtgtgaaggctgtcttctgatctgtggacagggctgcagttccacccacactgggatccctctcatcaatgtttctttactttctaggacaccaatcttaatccagcagttgttagtgaaagaagacatatccaggcacttattccctttaaaaaactacttttgctctaagcaaagtcctattccctgcccgttccttttggctatcaagagacttgcaattaaagcaaactaaatgtaaataatcaaaactatgtttttgctggatgtttactttggataaaatgtttgaagttacactgatacattgtactacagatgcagaaaataatttaagattgtagtttaagttctgatacacgctacatgtaagacctcccagca

SEQ ID NO: 355 - DNA, 423 bp, Rattus norvegicus
  Genbank Accession No. AI059117
ttttttttttttttgttgcaaccttgtaacttctgctttaatggcaatcaagtttaaaaatgtacagttcacttcttcatactgtttgttcctttataaaaggcagaattcaggtaagcgtctagatgcatgcataacgtagaggcagatattttctggcagtccttggttcctgaaagttggacttccatcagatgtggttttaagcttttgtcaaaatagtcatgaaggatatgttacttctgcataatgaggtaatatctcaggggtggccactcgccataagatgtacaaatccactcatctaaacttgcacgaggctgcatatgctgtaaaatgtatattcccctcctgagtggcccttccatgagttcttggtctgtaacagcagctatatacatgttgtacacaggattacatgga

SEQ ID NO: 356 - DNA, 346 bp, Rattus norvegicus
  Genbank Accession No. AI071727
tttttttttttttttttaatatttctagaggtatagatagagcattggtttatttctaaatcacaggtttacagatatttgcatctcattgtctttaaaataaaacggttaggctatctgaaggtgatactcttatcccctactcctttcagaaacttcttctcatcacgtggtagcaaagccagaccacaatgactctcagctcccaggttgtctgtttctttgtttcttgcttcttttagataataaatgcattagtgcacagggaagaatatttttggctcaattcagggaagatatttctcttatgagaaggagtttctctaacttttctcctttgtaaatt

SEQ ID NO: 357 - DNA, 265 bp, Rattus norvegicus
  Genbank Accession No. AA957335
tttttttttttttttttaaaaaggtttctgtaaatattttattttccatattttagaatcagaaagaagcatgtggtaataaaaataatagagaattattttcttcagatagtcccgctctgctgcgaaccgccagcccctccagtccagccccttccagccagctctcaccaggcctcgcggctctctcatgagcagccgctgacccggtatcagtcccactatgtacagatatattacaaggcaaaaagaaagcctcgtgccg

SEQ ID NO: 358 - DNA, 435 bp, Rattus norvegicus
  Genbank Accession No. AI008416
tcagtaaacaaccaattcgattttcctattctagccatataagccagctggactttgtaaggaaaatgttctgaagcgtcaccgtcaaggactacagaaaactgccacccacagataaactgccacagtaagtgactacagcgtggctctgtcactcataccagacaaccccaaataaatactttatgaaaagaattaaagtctatcaaaaccacttaaaatagaatcttaaatgcagaaatcttaattttccttcagttgggccagaaaccaccacagaccctacggtcagggttccaggaagctgcccggcgggtcatgggaataacgccgccgcatcgccagtcggcatcgtttatggtcggaactacgacggtatctgatcgtcttcgaacctccgactttcgttcttgattaatgaaaacattcttggca

SEQ ID NO: 359 - DNA, 600 bp, Rattus norvegicus
  Genbank Accession No. AA818407
tttttttttttttttctgagttaaaagttttattcattcaacatctcacattacaaatatttaaaaattatatgcatactggtataaatagtcatttgcaaactatttaataacattaattttccactagcacttcaacaaatgaactcttttaaaaaaggaactgtgttatataacttaagagtagaacatacaaaaataggaacttaaggtgaaaatgactttaataaaaaaatgaattacccttatttaaaatgctagaataaatactacaacctccccatacacagtaaaaactatatggaaattcagccaagtagtacaattaactgacacacttaaataacgctgccttctgatagtgtgagcaaacactgggaaattagggagcagtaaaaaccagacacccacttgctaaaagtttcacttccaaaaaatataacaaaaatctgatgaaattataaaaactaattatactttaaattttaaaaatataaaaaataaaacagttgaatacaatattgtcccaattcttacaatgctatcaatcacagtagctttaaaataagataataaaataaagcaaatgaccaaaacctc

SEQ ID NO: 360 - DNA, 432 bp, Rattus norvegicus
  Genbank Accession No. AI228335
atcagttctgctgtttatagatttcacgggaaggccgaatacattttaagggaatgaggaaaccgttcagtgtctagtaacatgaaacagtatcacattattccataggaaacgtgtatatttatgtagaacaggtcagtcctgagaaacggcgtcagctcagttcgtgtcccatccatcctcctctgagatcgctcttgctgcgtccataccagacatcccaggttggttagcagggcatacatctgaagctctcaccagacctccgcacctcatctacggctacatacagcagcctaaagaagcacggctttcaggtgtggtgtaaagactctgaggtaatagggaacgagttaatttgttcttggctgtagttggctcccaaagagtgcctgtgtttttcaaatgatgtcaactagaaaaagacaatgt

SEQ ID NO: 361 - DNA, 673 bp, Rattus norvegicus
  Genbank Accession No. AI170394
gctaagtacacactttaatgaatatttatacacatttttgttagtagagctacatatttatgggacaaatattagacactttaacaggaagtttctgcattaaaggtctggaagtcttctgctgtgccttgttttgcagacttagtaattcttaaagaatttacaaaatgaagccagtatgtttagaaatgtgattgtcttcaatgaaacattaaaatgcaccccaaacccataaagcatacaaaggttaaggagaacattttattgttcaagaagcaggtttgatggagaggttatacatcaacccccttggctgggcagttggtagggcagagttcaaattcagtcattcatttctctcataaattactcaactgaaaaagaatgagtaatttactcccattcccagagattgagacacttggagctcttcaggtgggcctactgtgtgcacaggcccttgattgtaaatattgaagagagaacacatcgtctttcatagaagatagctcactgaagatgtgctgtgatgaatagatacataacttctaagacagcagtggaggaattttcatgttgtagagaattaaattctcagaggtgaaaattgagcaaacccccaactattgctaggtgtcaatcatgcagcctgctggacgcccccatggaagcc

SEQ ID NO: 362 - DNA, 552 bp, Rattus norvegicus
  Genbank Accession No. AA817891
tttttttttttttttttgacagttgagatacacaccttctattccttaaaacacaaaaactcacttttgtgaaaaatattccaagattactttctccaaaagatcaccaagccaaacatttggccatacttttatttactacatatactataaacatatacaatacatgctacaaaaaaaaaaaaaaaaaacgttttttttaaaatttacttaaactgtcaagaaagtgtatagtgttataatacaatggcacatgttcatattttatttcaaattggtttgcttatcacccatttcaaaccattaatagtgaaatgttacttgtggaaaattaaaattacctatttgtattattaataaacaattccaacaaattaataagaattaaccatgtcaaatattagtatccaaaaatgggctcttgcagaagtgaatatataaaacatagcagccgatttcagttcactttgctctgtgacaatgcacttatgcatccgactagggttacggaacttgctgttcgggagatgtttgtaagaagtcctttgatct

SEQ ID NO: 363 - DNA, 625 bp, Rattus norvegicus
  Genbank Accession No. AI169337
catgttacacaggtaaaaccctctttttattatatacagaacacattgaaatagagcatctcctctgaacacaagacagaaggccctggctttctgtaagctcccaaaagaacatgaatcatggcctcgaaagagttccttctcaaggtggtggtgcatgcctttaatcccagcacctgggaggcagaggctggtgggtatctgtgagttcaaggccaacctggtctacagagagccttctaggacagataaggctattagagagatgatctcaaaaaacaaaacggagttccttctccagaagaaaggaggagtgcaggggaggaggcagagacagtgtacatgtaaaacctgattccacaggactttcccagcatcatctgaaactatacatcccttgccttacagccggggggtggtttctttggtccagtagacctaggactggggtgtgcaccactcagtctacctccatcttcttattctgcaaagaagccacaaagacttgccactccgttgggtaaaagcgcttatagacattgatcttattccggatctgttttggggtgtcttgatagtaattcttctcatcccgggccatggccttatagtcctatccatgatt

SEQ ID NO: 364 - DNA, 622 bp, Rattus norvegicus
  Genbank Accession No. AI237594
gttaactttgctctggattatgtggcttttgttcaattatgagaacagatttaacggatggtggatttttggctagcttaatggatgatataggaaagtggaaagtagaaaacaccaggaaacatacattcagagctagatatgtttgttcaagaaacctaaactgtctaatccattaaacacaatctcctcaaaaagcaatgaagactctactaactgatacacagggtttcctcattcaaataaaatagacagaccaactaacctagcagctagctgaaatacaaagaagaaatcccaattagaacacccaggttcatgataaaatacatgcatttaaatgtggtccttctggttggaagttggcacaagacactaaattcttcccgaaaatagaaagcacaaatgaagattggggaggagtctcactttatgatcttgctctcaaattgtttagcacttctccacttgcgaatacacttgagacagtaggtgtggttgcagttggagaggatcccaaaacgacgctcgctggggttggctttctcatagaccacctccatgcagatcccacacaccatgtccttgctgcgctgaacagcaaaagagagctccatgtcct

SEQ ID NO: 365 - DNA, 1683 bp, Rattus norvegicus
  Genbank Accession No. U34843
gtcgaccaattcggcacgagggacagggcagcgattgacgcggcagctggaggatgaagaaggagcatgttagtcactgtcagttctccgcgtggtacccactcttccgaagccttaccatcaagagtgtcatcctcccgcttcctcagaatgtgaaagactatttacttgacgacgggactctggtggtctcaggaagggaagacccaccaacatgctctcagccagacagtggtgacgaagcagaggaaacacagtggtccgatgatgagagcacagccacacttacggcacccgagtttcctgagttcaatactcaagtccaagaagctatcaattcgctggggggcagtgtcttccctaagcttaactggagtgccccaagggatgcatactggatagcaatgaacagttctctgaagtgtaaaagcctcagtgacatcttcctgcttttcaagagttcggacttcatcactcatgacttcacacagccgtttattcattgtaatgatgattctccagatccttgtatagagtacgagcttgttctccgaaaatggtgtgaattaatccctggggctgagttccgatgttttgtcaaggaaaacaagcttattggtatttctcagagggactacacgcagtactatgatcatatctctaagcaaaaagaagaaatttgcagatgcattcaagactttttcaaggaacacctgcagtacaaattcttagatgaagactttgtgtttgatatatacagagacagtaggggcaaggtgtggctgatcgactttaacccatttggggaggtcacagactctctgctgtttacttgggaagagctgacatcggagaacaatctgcgaggcgacgtcagtgaggcggacgctctggagcaggattctccagccttccgttgtacgaacagtgaagtcacggtccagcccagcccctatctgagctacggcctgcccaaggacttcgtagacctttccaccggggaagatgctcacaagctcatagattttcttaagctgaaaagaaatcagcaagaggacgactgagcgctgcttggagaataagtcaagagggaaacagcttttcagaagcctcatatagaacacaacttcccagtgacccaaactaggtgcagatgggtgggcagtatgcaaaatcatcagcttttatattcgtgtatatttacctggagaaagatggaggacctttggtacttgtaaaagaaataacaatataataaatagatcttaaacacaaggaagcacactgtgatggtttgtatatgcttgggccagggagtggcactatgaggaggtgtggcctggttggagtagggggtgtcactatgggtgtgggctttaagaccctagtcctaactgcctggaagtcagttttttcctagctaccttcagctaagttcctcctgcaccatgcctgcctgggtgccgccatactcccaccttgatgataatggactgaaactctgaccctctgaacctgtaagccagccccagtgaaatgttgttcttataagagttgtcttggtcatggcgtctgctcacagcaactatgctaagacacacactgttctgaaaataaaataactttctacgaaaaaaaaaaaaaaaaaaaaaactcgaggtcgacctgcaggcatgcaagctt

SEQ ID NO: 366 - DNA, 396 bp, Rattus norvegicus
  Genbank Accession No. H32977
  misc_feature (1)..(396): n = a or c or g or t
aaaggtttggcactttattaaataagcnccaaaattacatacaaatcaaaagagtaagaaaaataaacactcagcaaaatgtctctnggtagcatccagcaccactgcagttaaagtatggcatagctgtggtatcaccatgctcgctctccccgtccccaaggatggcaggacagggacatcagctttccaaaccaaactgtcatcattcattgctatccctttctttaccatttaacatacagngaacacacttcaatggaatagactaataagccaagagctttattgatgcagcaggcactttacaatggancccaagagagcctgccttctctgagaagacaggatgtctgtacaaactctcatcaggttttttccacttcagaacccaag

SEQ ID NO: 367 - DNA, 580 bp, Rattus norvegicus
  Genbank Accession No. AA901338
ttttttttttttttgttactttgtttttagctaaatttaacgagcagtttattgtagaaaagaaaaccgaaggacagatcaaattgaaagaattactgttataataactttaatttatcttgcattttacagaagtctatgaacgattttaagaagcacctccttactccatcacgtttctctgacagttgttaaagtaggcaacgagtatatcaacagcttgaataccggtatcttgcaaggatttcagaacaatcactcgccaaagaacttggcagtttctatcttgtttttaactcaatggtacatccactctgatggtaacctgtccagccaaatctccaccacattttgaaaaaatcaatggtgattagcaaattagttagctttggcacggagctgtgctcgcttgcctgtgacagcctggaagccagttttgatactggccacagagcatcgagaatgacaagtttcacactgtaagaaatagagtcgggtgtccttctgtaagattgtgtccggtgaccggcatgtgtgacaagtgacgtattccttgatatatcttctcaagacgttttct

SEQ ID NO: 368 - DNA, 598 bp, Rattus norvegicus
  Genbank Accession No. AA800817
gggggaaaatcccacagattttgtccactttcaaaaaaatgaaaaaaaaatatttacagaacagccatacacacagaaaatcaaattagaaatgcctttaagaaaacactcttctcactgctcctgatgtacatttttaaactcaaattttaaatctcaaccctatagttgaacattttcccaacctagtttctaccataatacttcctgtccctcaaaacttaactccaaacaaataattggaggacagggctaaaggtaaaatagaacacaagattacccagggattgtttgttttctatactgacatctgctgtgaccaatgaggacactgtgtgtgactcactggctctgctgaaaattcatgatatattgctgttacagattgtcaggcctccacctgacaaaaggaaaatccaattcaagagttatcaacctcaagctggctttggcaattacattaggtccccttcctcacctcggaaacacttgttttaagatacaatgaaatattcttgtacatcagagcagattttgtccaaagacccttaacatgaagcccaaagacagaagaatcaggtcaaactaacaatacatt

SEQ ID NO: 369 - DNA, 441 bp, Rattus norvegicus
  Genbank Accession No. AA944530
caaagaaccgctttattgatactgtgaagctgggcttgctgcccgcttgggtggtcctgtagaaaatacctgggaactgtggcagccccggctaggcacggtcgtcactgccacagcagaagggcacaagaaaccctgatatgaatgcagtctgggggtgggtagggatgtgcagacccacactggctgggtccccagaatgtttttggcaaatacaaatccttgccttgtaggtgaggaggtaggcgaaggcccccagaagccccactgacacattcaccaccgagaagaagatgagcagctccaaggctccccagaggggctccagtaatcgtccggccacaactactgtggccagactaatggccacgtcccacacgtgctgttccatgagcccatgggtggccagggtccagatccagaagttgggtggaaaaaggt

SEQ ID NO: 370 - DNA, 580 bp, Rattus norvegicus
  Genbank Accession No. AA875032
tttttttttttttttttctgatcttaattcattttattctacaaaatgctactcagtggaaagtaggaaagccaacaagacaacaagaacataaaacgagaacaaaccccgagggaaaataagttttaatatgttcttccctccatagcagcaagctctaaacagctttccttagtgcaaatactgtaggcttgtgtcacacacagtacacagaacaacgcaacacacaccaccacagatgcttctgagcagagatactcctcaaaaatttaaaactatacaaagattttttgagcacgtggtcctgcctggagaattcgactagagagaccctcctaggaccatttcaccattactgtaaaaacgggacaaaaggtccccagaaaggaaattagaattccccatggagccataaaaccttgtacaactcgtttgcctccagggtctaatagcaaatttcactgcacgtcattgacatatcccaaatacggatgcataaagcttgagtttctacgatataccaaaatacgatatatatacaactcccactgcaaaagaaaccctgatacctagtctttat

SEQ ID NO: 371 - DNA, 805 bp, Rattus norvegicus
  Genbank Accession No. M15562
gtgattccagaggtgactgtactccccaaaagcccggtgaacctgggagagcccaacatcctcatctgtttcattgacaagttctcccctccagcggtcaatgtcacctggcttcggaacggacagcctgtcaccaaaggcgtgtcagagacagtgtttctcccaagggaggaccacctcttccgcaaattccactatctcaccttcctgccctccgtggaagattactatgactgtgaggtggatcactggggtctggaggagcctctgcggaagcactgggagtttgaagagaaaaccctcctcccagaaactaaagagaatgtcctgtgtgttctcgggttgtttgtgggtctggtaggcatcgtcgtcgggattgtgctcatcatcaagggccttcggaaacgcaacgcagtggaacgccaaggagccctgtgagataccgggaggtgatggcttccgtgagagctcatagaagaaatgtgctgtgacagcatctgaggctaccccttctctcagctcttcacctcagcagagacatcttctgcagtttccaacctcaagcctcgcgccagattctctggtctaatgtctggctggggttctccgtctgcttcctgtatctatattctattttccatcatttatagtaattcctctgtggcacatatcacagagctcttcctccgctgcggaactttctaagaatggaggcatcttctgttcacttacggcttgacatttctccaaactgtgttttctctttctctttttcaataaataataaacaccttgggtcctgaat

SEQ ID NO: 372 - DNA, 294 bp, Rattus norvegicus
  Genbank Accession No. AA851814
aatgagtatcttatgtacacacacacaccatacaacaagcttggttccattataattccatcaggcgctcaggtatgttcaatgacctgagatagagttgatgaagcatggcctttaggtcacaatgaagtccatcagtgagttgtcaggctgcagtgtggggattgggacatctgctacctggatgatgttgacttctaggattccatctacaattgtgatggtggctctgaagtaaccatatctgtttattcggcagttttcattggaaatgtcactcagctccatggattt

SEQ ID NO: 373 - DNA, 561 bp, Rattus norvegicus
  Genbank Accession No. AI012379
aatggcaggtcaacaaatatcctgaaacatacatagattctgatagtcttctaaccccagttgaattcaaacttgaaagtaacacacgcgagctaagggaagtcaatgttgttccaaggcacttactgaatctccatgactagacgaaaacaagaaccattagggtgaacaattagacagtatataatataaaaataactttttgcttacaatttacaaaaggtattattattacactctttgatctctgataacctgcaatgctggctacacgaatccagcaagtttaaaattcagaaacagttttctaaaatttcagggcaaataatttacaagtaagatacacaaagacttaaaccatgcagaaattcttacatcttctgttaataatattttaggacttcaactttatcaaattatatacctacttgccctgtacatatacaaaataatgcatacatgataaaacagcaaaagagtagtcctttaactcagtttatcataaaagtattactatattaacaggtctacaagcagcttgtaacagggttaagagacatt

SEQ ID NO: 374 - DNA, 441 bp, Rattus norvegicus
  Genbank Accession No. AA945932
agaaatgagagacagaatagccagagccttttggaacttccaagatgttcaaaatggctacatctctggggcagagaggagaggggcaggctgtcaagagccagggctactgctcttgggagcagagagaagagcaggagtaggaaaaccttatgggtcatacaggaaaacagtagttgtaggagggaaagggaatcctctgagctggagcagcctggaatgaactggggaagtctggaggttagcatgcaccagagatacttgttaacaggcagcctgatgcctcatctaccagaggaaggagagatagggaagtggctttcctgtcagacagacagaaatctgttccacaggttcctgaggaatagtggatgtatctgccagcagtccttctgtttttcctccagaatccacccctgctgaagtcaaatatagacagca

SEQ ID NO: 375 - DNA, 453 bp, Rattus norvegicus
  Genbank Accession No. AA957139
tttttttttttttttttcctttgcctaatggaacgataactgctcattttctatcctggcaagattagagaaacaaaaaacaaaagagggatagtaaggctgcttgttgattgccactttcgaagatacccttggtgaacacgcagcattacagtctcaacaccgctacgctggtggtggtaggtctcatgtcaactctgcagatttcaagagctctagaaataaccacgtaagctgctcagggtcttttcaggacctcccagagatgagttatacactcacttgtaaatcaacagttagaagaccgtgttaagataaacaagtacacataaccccagacggaatgtactcagtttccttttcaacagtcctgattcatggcaattattgagaactgtatttatccatatgtaaaataataaacgatgctgagaatcttgtttgtcccaagca

SEQ ID NO: 376 - DNA, 519 bp, Rattus norvegicus
  Genbank Accession No. AA943748
gacaagactcaaacacaaaattatatttattttcaatgacaaaaacaacacaacaaagtggaccaatcaactaaattttaagtctacataattttcagcagaaaacttacgttccataaaatttacaaacatatcacaattaagagtctccaacctaccttgtctgaggatagcgacaagggtgaaacacagaatcacaaacttacagcacagagctttaagatctgtgcgtgtgtctataacttgattttctctttgattcctgactgtgaagtctgtatatgacatcttttatgttggaaagggtggaagctcccccaggcctagggcttcgtgtacacagagtggatggtaagtaaccaaatacatgctatagagacttgattcaaaactcaaacagcaagagccacggaaggagaggagatttcaaagactgttagcaagatgcctgtgggataattcaacaccatcgaaacagagcccagagctccctgggggaatgggatagtttgggacagt

SEQ ID NO: 377 - DNA, 597 bp, Rattus norvegicus
  Genbank Accession No. AI177096
gcgtgtatatcaaagcagtttattgacctccagtagcacagctctgctttactcgagggtgtggcaagcgtacaaaatgcaaggttccaggtgatccataggcatggctatctgctgaccaatggaatgccctcattcacgaaagggcagccggtagcttacaaaggtcacttaggtgccctgggcccagccactgtgtacttaattatcaaggggtgtgtccaccttgccagctcctcactcatactgcaggagagagaagaatggcacaggtcccagcttctccctgcccttcagggaggtcagctccaccaggctcacacactccaccacctcagcccgcagctggctcagcagctcacaggctgcacacatggttcctccagtggccaggagatcatccacaatgaccactttctgccccggttctaaggcatctttctggatttccagctcagccttcccatactctagagaataggaggctgatacagtggggcctggtagcttcccgcgcttacggatgagcacacagcccacccccagctcctgagcaagggaagggccaaacaggaagcccctggagtccagacctgc

SEQ ID NO: 378 - DNA, 553 bp, Rattus norvegicus
  Genbank Accession No. AI145859
tttttttttttttttttggagatattgctttttattgaacatgtagaagatccacttttatataattataaacattttacaaacagttttgttaaaaaacatttcctggattttatcactgtatggttaagacataagacatatataagtatgaaggtcattctccaagtattagaacagaataccaatggagtcacttcgttttttttttttccagcgctcaggaccaaccccagggtcttgcacatgccagaaggttccttaccgctgtgctgcccttcagttaccagtaacatttttttcataaacactgtattaacctctaaaggggtaaactaacccggaggaaggtaatcctcaagacatattgtcaaagttcaccgaagtcgtctacagtctgtctttccttgcactgaatctggctgatgaatagcagtgtaagaatgtatataagataatcacactcacttcaagatacagaacacattgtaaatcaaaatttttatcatctttgctctatggggagaccactcatattaccatttttacattt

SEQ ID NO: 379 - DNA, 391 bp, Rattus norvegicus
  Genbank Accession No. AA997981
tttttttttttttttttagattgaatgtagcaaattatttattaaagccagcacttaacagacgattcaacagcaactagtttatcacggtactccatgtcagaaattgtaactgagcatattttacaacaataaattacaacaattaaaaaaaaaaacccagtaagtgatctctaacttctgtagccacatacatatgcattaaagaagttaggaaactgtgatcttccttttctgctctgcctgtgtaggaaatgacaggctgatgctgaccagacaccacaaggctctgaggctggtgcttttccccctacatcataaccgatttcaaatggtgctagacaaaaacagactctgaacaccaggagaaatcggtcagcctgtgtaagag

SEQ ID NO: 380 - DNA, 349 bp, Rattus norvegicus
  Genbank Accession No. H31665
  misc_feature (1)..(349): n = a or c or g or t
atgttcagacttattttaataacaatacatacaccatcttggcactgtggatggaatgtaagtncaggttggacagggggattttacagtgcatttaatattctgtgtatccaaatttgtatgtaaatattggaaaaaccagcccgcccaccgttcacctctcaccttcggtactttaatagccatggccttatagacggtggccacgcggcctgcacaggctgtgtgcattaggccctttagccttgttttacacttgcagcacctacttctgctggggttcaactcagtgcacagcacttgcttagcctatgtgaggcccctgcacttaaatgcccagcaccacaaa

SEQ ID NO: 381 - DNA, 712 bp, Rattus norvegicus
  Genbank Accession No. AA799991
  misc_feature (1)..(712): n = a or c or g or t
acaatcagtaatataatcaaatacacaattatatacaaggattatatacattttgcccagacttttacatcacagtacatagtttccattaaaaatattgtttacatttatcaccaaacaataaaacccaacaacagtagtgttacagcacctgttagtacagacagctttttcataaattacatcataagaaaatatacggctgtaaattgggcttttaaaaatgtctttttataaaatctgaacatacaatgtttcattcacagaatgtttttttttttcaatgttctgactgtacccttgtgcataaaacaaccagctggaatatttagtaaatgctaccctccctctaaaactataagcactgtttgaattacttaggctgagctttctttatgatgagtctggcatggagtttggtgagaaaacaacgctggctttgctataanaaagtcatatgatggtaattaaatctaaagattccaggaaataatacatagggaattgattcagaaggcatattttcattagaatactacacgtaagaaaaggaaaggaaatgcaataatgtccaaaagtaaaccttcggaccataaaggttnagaaaaaaacattcaattccgccaaatccagattacatctccattatttaggaaaatcaacagctaattcagggttagggaaacacattcaggaaatttgctanaccgtg

SEQ ID NO: 382 - DNA, 2842 bp, Rattus norvegicus
  Genbank Accession No. D13623
tcgcggaaggtgacgtggacacggaagtggtcgtcgtcgcggcggcaccggtgggagcggggccctgcacttggagtgcggcgggcaagcggacgggtggcggaggcctctcagcggcggcggcggcgacttaaggcgcaggcgtggtccgttgggtgcgaatccgctgagcccacgagcggcctcttagccctctctcctgcccgtcggaaaccgggagcagggacccgcttagccggcgtcatcatgaccaagaccggtagcaagggcgggaacctccgcgacaagctggacggcaatgagctggacctgagtctcagcgacctgaatgaggtccccgtcaaggagctggctgcacttccaaaggccaccgtgttggatctgtcctgcaataaactgagcactcttccgtcggatttctgtggcctcacgcacctggtaaagctggacctcagcaagaacaagctgcagcagctgcccgcagactttggtcgcctggttaaccttcagcatttggatctcctcaacaacaggctggtcaccctgcctgtcagctttgctcagctcaagaatctgaagtggctggatctgaaggacaatcccttggatcctgtcctggccaaggtggcaggtgattgcttggatgagaagcaatgtaagcagtgtgcaaacaaggtgttacagcacatgaaggccgtgcaggcagatcaggaacgagagcggcagcgccggctggaagtggagcgagaggcagagaagaagcgtgaggccaagcagcaagctaaggaagcaaaggagcgcgagctgaggaagcgggagaaggcggaggagaaggagcgtcggcgaaaggagtatgatgctcagaaagcttccaagcgggagcaagagaagaagcctaagaaggaaacaaatcaggccccaaaatcgaagtctggctctcgccctcgcaagccaccaccccgaaaacacaatcgctcctgggctgtgctgaaggggttgttgctgctgctgctgctatgtgtagcaggagggctggttgtatgccgggtgacagggctgcaacagcagcccctctgcaccagcgtgaacgccatctacgacaatgccgtccagggcctgcgccatcatgagatcctccagtgggtcctccagaccgactcccagcagtgagctcatcctcagcaccgctgcctcccagcctcggagcttggattcctatggaattgggttctgctggacacaacttctttttagcgtcagacctacctgccatcatcaaatggctgctgagtggtacttgagatctcccctttgtaggacttctctgttccttagtcagggttccctggtggaatgaggagaaatggagaggggggaggaagagttacctgcatgcctaaaggaataggcttaggggtggggagagagaaggcataggcttttctagttatgcaaagctgtgtaaggcaaggttcctttctactaaatggtcagctgtcactacatttatacttttgtatgtcacaaaccctttctttcattcctccctgggtaaccaggacggattggagggcagtgtgttactgggactaggggactaggaatacttgggtaaattcagcctaagctgggagggtaaagtaatacatttccttaaagatctcagacagtcaagcattttagcaatgtccaaaatgtctggctatgaacacatgttcactgccattggtccagtgtaacactttgaggcaggaggtgccgtccatgacttacttgcctacagtgttcaagctagtccaaggcacaacccagctttcactccagttttcttcctttcctttatgtcatttggcctcctttataatactcaaggggatgaactcacaccagagttgtcttagctaaagtgaatctttcataatagacggtcttaccacccacaaatagatctcatcagggtcctgggaaactaatcctgtggaattttgcctcagcttaaatggcttccacaaaatggcagcaggctgggctccttgcctcccttttagagcattaaactccctgatggcctggaagcacaggggcagatctctgcagcggcactgtgactgccctactagcacttggtatgatgaaatacctcaaaggcaacctagaaacttgatctcacagaagcaggtgcagagttgcttctggacctgtaacagaagggaaggaatagaacagtgggagccaaagggaaacaaagtcacacggtggcgctgcaagtgatacataagtaaacattagcacaaaccagggcagcagcacccacctccctgctgctaccagaaagcattctccccgcttccctgtctcttcacaacagctgcaggaagggatcggaaacctgtctcggtgcttatttgctaaaactcccaactgcaagctctccctagaggagcaggacctgtcggagttcagacagtgtagccccagtggcccatgtgcttaggtcagccactcaagactgtcctgacacgggaagaaaggcctttgtttttccctcccccagatagttctgccgtgtaggtccacaccttactcagaatcactacacattcctttagtcttcctccaagctccagagccatcggtacaaatgctttattgagacaaaatacatactacatatggtgacatcatgaaaacagaagtcagcctcatagatccctggctggttgaggcagctcagtggctgggcgtagtcaagccaacccgcaggcaagagttcactctgacttcgagatttgatgcttattctttggatttctacaattattaaatccgtgtctgagtggtc

SEQ ID NO: 383 - DNA, 524 bp, Rattus norvegicus
  Genbank Accession No. AA924105
tttttttttttttttttacatggagtgcactttattggggtcacttactgctctatggtggcaggaagaacagctgggtccccacaaagttggacatatgtatggcttagggcaaaaattgatttcatctcagctggatacacctggcttaagcttgcatcaaaaccagacacattccaaagtcccaaagactagtagtttatccatttataatctgctgaggaactatgcaagaaaacccaacagttacccaaagacactcatgatggttacacctcgagatggctctaatcatgtcaggctgaatccatgtgaatactgtggactacatgtgctgctttaaacctgtacagaagaatacgtgctttaaatatctataaaaacaaatgcttagcgcttcctaggtggtcactggggagacagaagaatgcaggtggcagtacgccctccttctcaagcaatggcactgttcccagatcttgggcctagcttcagggtgcttatgcacgtctgaactctctgat

SEQ ID NO: 384 - DNA, 487 bp, Rattus norvegicus
  Genbank Accession No. AI012146
  misc_feature (1)..(487): n = a or c or g or t
gtgatttaaaaacattttttaatatgaggtaagataggttttttttctatcaaagttaacaaatgtatgtcagaggcttaaaattcttttttatgctcacacttaatcaccaatatgcaaaatacaaaattagatgccaaacatgaatgccttacaggaatcctttacataaatgtaagctatctgtaaactttacataaaatacatactaattcagacaaagcatttcatttactaaatgtgttcctaaagctagttacttaaataaaatagaaattagaaacagagtaatttattgggcccttttctttatatgcaaaacagagaaacacactgtatatatgcaagtatatatgtatatatacatgtatacatatacatacatatatacacatacatacacatacatacaagcctcagaaactagaaaatcaactacattttcgacaaaatgagcctttcttgctcttattctgaanatctcctc

SEQ ID NO: 385 - DNA, 508 bp, Rattus norvegicus
  Genbank Accession No. AI012308
tatttttgtaaggatacattgaaacattcgatggaaacagctaatgacaaatatggaaatgaggtgtgggcatctagaagcactcctacagtaatatatgagtgtattttcattacatctttactttgatattggctcgttatacatgtggtataatggagagtacgatcagggaggcaatcctgcatttcagaggaggaggaaacccagccctgcctgtaaagggtgagggctaccctgacagccccagagatctaactcaactctgcagggaaagttctctaggaatcacaaggaaagggactctgcactcttcctgaacgcagacaaagagcagacaatggttatgctacaaggacttcaccttgtcactactttgaaacgtattcttgttgatgacagccctgtgcctgctcagctgccactctagagcttttgtcacttatacaggatcaatcgcaaaactgcaggaacgtttgaggaggctcatatattgtcatgcaagttt

SEQ ID NO: 386 - DNA, 420 bp, Rattus norvegicus
  Genbank Accession No. AI228030
aaatgaacacatgtatttcacagtactgctttatacagaatgctaagagcacttttttcttcatattttacagaagggcttaaaacatatggactttctttaatataccaaagtacatccaattctaattcctaaataaatgttacaattcattgaacatttaaaggcttaatggcaaagtccgggggaggaaaggattaagtaagtttattttacaaactggctgaaaaataacttcaagaaagtcaataaaattcagtacggtctcatcctccctgacgaaggtggtgcccgatttggaggcgtgatggctatgtccaaataatcccctatttggaacttctgtgactgcagggtcatggagtcatcagtgcccttcctgccaaacatggtgctgccaatctctttaactcgatatcc

SEQ ID NO: 387 - DNA, 496 bp, Rattus norvegicus
  Genbank Accession No. AI111960
tttttttttttttttttactttttaaaaaatttatttaaggaacacaaaatgcatctaagtaattttttttttttttgttttgttttgagatagggtctcccaagtcatgggatcaaaggtgtgtgtcgccattactcgcagagtctaagtgattttttaaaaaccaaaatttcaatgtcatctgcttacccaccactctctccaggctcagggtgtgaagacatcttctgatttccgtactaagtgtctgaatgactgagtcaagagcatgcacaatccagtgggctgggcactttgccacttctggctcggaaccctgaccaccctcccgtcccacaccagtctcctaggcccacagtatacacttggagacagctggtgagggtcgcccaagttagaacaagttttcctgtaaaaacctaactagttaggctcaaattccagcacagcctccctggcctgcaattctggtcaatacaactgccgacactgcac

SEQ ID NO: 388 - DNA, 423 bp, Rattus norvegicus
  Genbank Accession No. AI008442
ccagtagttcggtgtttggacaggtggcaggggacaagttggcaggggagtgtggctcaggcaggtaagcaggcaacaagcagggaggattgcagatgggggctgtcctgtgaggggtgtggcatccctccagccgctgcctgctggggccttggtctgtggcttaaaacttggcttagaactcggtatccaccacacggaaagctggcctgcctgagtcaggcatagaagtggaccgaatgttggcctccttttgtagctgtacctcctttagtgcaaatatggaagtagtgtcaggaagtttgtggatccgctcccccaagctgagaaagaatggatgtttcatggcatcctcagcagagatccgattgcgaccctcagactgcagcagcttggtgaggaggtcagctccatcgctatcaa

SEQ ID NO: 389 - DNA, 400 bp, Rattus norvegicus
  Genbank Accession No. AI013924
gacagttggaaacaaacccatcaaactggaggtgatgacatcccaaaagcccaagaggcaagggggtttgcattttaccccctctacttaaaaatttttttaattaaatgcattttagcaaaagtgattaaaaaaagaaaagggtcaaagccccagatgtcagcgagcaaggtggtggctcaggaaaaacgggctcttcagtcctcccaggaagtagcctaaaagctgccactgtccctcagacacaagctcgagcaacccaaccaatcctccctgggcaaaaggcccctgtactggcccttgtgtttcctaaccccttcaaactcggaaactccaattctgtgtcaagccttccctgtaccctcaaagggaagctgaaagggccctggaggaggacaag

SEQ ID NO: 390 - DNA, 686 bp, Rattus norvegicus
  Genbank Accession No. AI102486
aggaggaaaatttttataagtgactcatctgacacaaaggaacttttatctagaatgcattaacaaacttgtaaaacttcataatagaaagacggacaacctgaggggcaaacactcttaagtctctgaagcagatacacagcaaacatgagaaaagatgctccctcgtcagccgtcaaggatggcaactgcaggtcagatgagacacactccagtttcctcagtacggctagctgagagggcaagtccccaaagggtttaaaataattatcatatgacctggaaaacagactccaaggtatatgacagagaatcaaaagagacacatccacacaaaacttgcacacaaatttcatagcagaactcataatagctaaacactgcaacaagcgaaatgtccaccaactaacaaactacacagcacattcactgcacacgatagtcttacaatgggaaggatcgagtcaggtacaagttacagaaagaatttgtgtttacaaaggctctgaaagaaacatgtcagttgtgggtcaagtaaaatctttctaaaagattctaggtcattaaaattaccctatttaaaaagaactaaggtgaaaattaaaattaagagtaacttcagggagagtttctttagagaaactggacacatacatcatagcaggcataccttttcacacccgtgg

SEQ ID NO: 391 - DNA, 463 bp, Rattus norvegicus
  Genbank Accession No. AI176160
tttgttttcttttttttctttctcaaatttatttaaaaaggattagagctgatatagtaagacatttatgacagggtcaacataaaaatgatagctttggttatactcagcacatgcaacttactacagcgctaacacgggcaagcttcccatgtgaagctgcatgggtgggtggggcagagttgagagaacagggctcacgtggagtacaggagagcaaaggcataaggggccacagggaatgcctactgtcacactagcagcaaggtgcactgtatattacacaaacacctgtgtagcatccccttgttctgatacgtcccatgtttctagttacgtaacagcatttgcagtctgtggttaccagactaagctggtgatcacaggactaagaatctctacccaaccagtctggtgcgttttcatgctgaccccctcactggtgttgacaactaattaaaac

SEQ ID NO: 392 - DNA, 365 bp, Rattus norvegicus
  Genbank Accession No. AA924428
tttttttttttttttttgtcttcaaaataaaaatttattcaatctgtaacaagaacattgaatctgcacatctgcgcacaagttcacatttaaaaacagcggagcacatcagtactaataaaaacaactatgatacaagtgggacatcccaacaccaggattaaggaaggagatgagaccactctttaggttctgcttcaaatgcctcagaaaggtcccagagattccagggagcacctgctgttaataaagtgagagcatagagaagtttgggatagcctggtcgaaggtaacagtcagtgcgagtcctttggacttgtttgggtttcaagcaagtcttacaaagcaaagttcaaaagggggtg

SEQ ID NO: 393 - DNA, 521 bp, Rattus norvegicus
  Genbank Accession No. AI237075
  misc_feature (1)..(521): n = a or c or g or t
gagataaagcataaagtaggttaacaaagtagaaaaaaaagaatatgcaagatgaaagctaacacaggaggagtggggacaaaggctgagtaggtaggactcaagctggccaccaaggcactgtggcatacatatcaagaaacactgtcacgtccaacaggactccagatgttccccacttctcttgtgctcttatcagttggtgctgctgatactccactcagggctccaaccaatgtgtgcaggatgggattcttagattctgcgcattagttggtagggaactgaattcactcaccagtaaggaactaagtcagtcaattctgctaaggccaatgctttaaatgcagttttttttttaagtgcatttaataatcgggtcggtatgaaaacctagattaatcaaatgacctttgtcnccactagaaaaattgttatgggtattggcatttatttattcatcatatacttattagggcagctaanaaagtctaatgcctctgtcatgtattaccacagaa

SEQ ID NO: 394 - DNA, 330 bp, Rattus norvegicus
  Genbank Accession No. AI639152
ttgctggttgcactcaggcatgagtgaaactatcccacgtttaatgtcagcaagaagaggacacagctggaacagggtggtgagggtgactggattttgaaatcaatcatttgttacgggatttaccacttttcccacgaagagggggcaattggtgtattcatctttaatgacaaataagaagggcctgttgaaatggattgaaaagttttgaggcgagtccctcttactccaactggtgttccttgtaggtactgtcacatcatcttcaaaggtcagtacagtcttgtgcacagccttgccgagcttcaggggagcatcctgtgtgac

SEQ ID NO: 395 - DNA, 2513 bp, Rattus norvegicus
  Genbank Accession No. D00688
gaattcctgacggatctggagaagcccaatctcgcaggccacatgttcgacgtaggtctgattggaggcggcatctcaggattggctgctgccaaactgttgtctgaatacaaaattaatgtcttggttttggaagcccgggatagagttggaggaagaacatatactgtgaggaatgagcatgtcaaatgggtagatgttggtggagcctatgtgggaccaacccagaacagaatcttacgcttgtctaaggagctaggcatagagacctataaagtgaatgtcaatgagcgtctagttcaatatgtcaaggggaaaacttacccattccgtggtgcattcccacctgtgtggaaccccttggcatatttggattacaacaacctatggagaacaatggatgaaatgggaaaagagatccccgttgatgcaccgtggcaagcaagacacgctcaggaatgggacaagatgaccatgaaagatctcattgataaaatctgttggacaaaaactgctcgggaatttgcgtatctttttgtgaacattaatgtgacttctgagcctcatgaggtatctgccctgtggttcctgtggtatgtgaggcagtgtgggggcactgctcggatattctcagttaccaatggcggccaggaacggaaatttgtaggtggatctggccaagtaagtgaacagataatgggtctccttggagataaagtgaagctgagctctcctgttacttatattgaccaaacagatgacaacatcattgtagaaacactgaatcatgaacactatgagtgcaaatacgtaattagtgccatcccaccgattttgactgccaagatccactttaaaccagagcttccacctgagagaaaccaattaattcagcgtcttccaatgggggctgttatcaagtgcatggtgtattacaaggaagccttctggaagaaaaaggactattgtggctgcatgatcattgaagatgaggaggctccaatcgccatcactctggatgacactaaaccagatgggtcactgcctgccatcatgggcttcatacttgcccggaaagctgatcgacaagctaaactacataaagacataaggaagaggaaaatctgtgagctgtatgccaaagttctgggatctcaagaagcattatatccagtccattatgaagagaagaactggtgtgaggagcagtactccgggggctgctacacagcctacttccctcctggtatcatgacccagtatggaagggtgattcgccagccagtaggtaggatttactttgcaggcacagagacagcaacacagtggagtggctacatggaaggagcagttgaagctggagaacgagcagctagagaggtgttgaatgctctaggaaaagtcgcgaagaaggatatatgggttgaagaacccgagtccaaggatgttccagccattgaaattacccacaccttcttagagaggaacctgccttccgtgcctggtctgctcaagatcactggtgtttccacttctgtggctcttctctgctttgtattgtacaagattaagaagctcccatgctgaagtttcaccctcaggcctcctgcacgatcatcgcatgtgaaagaaagtgtggataaattacagcctatggtttgggccatttaagtgcacttgatttaaccctcatcagtttaatttcagtctttgtaaagtgataacaatccaaagaatcacctagctaatttccataagaacaagtttcatcctgtttgttagactaatttgtgtgggttgagagaataaaatgttgagtgcttaatttcaaaaagtgaagtgcttctgaggaataatttctgggttcttttgttttctttttgcctttaatgcaaaatagctaattcagaaataaaacacttgacttactgtgacttttgtgtagcgtccaaggtgtacagaggaaaatagtggctgaagtgttccctaggtatcctcactgactagctccatgtgatacacactacccttggcactttcttttctggactgtatctagacatgcattgacccttgtcagtaacattctgtgctgatttaaggaaattagcattattttaatatagtccatagttatctgatcagaggattagatctctaagtctacctgtgtcttcaagatggttatatttttctgttggttgatagtataccattttttctcaattaccaaaggacatatgaaatgttctctattgttatttgttgatacagtcaaatacagaaattaaatttgggctctgtgtgataacatgacttgcttgaattattaggttttatagcagacattaaattggatgattttatatacccaaactatggtctctatcttaggagtgttgtgggtccagaatgatgtctgtcttttctctttcccatctgaaaaattgtcaattaaaaaaacttttcaaaggtttcaaccacaaagcacttctttttctaaaaaaaaaaaa

SEQ ID NO: 396 - DNA, 530 bp, Rattus norvegicus
  Genbank Accession No. AI237586
cgcagcacatgtattttattgaatccactatgaacagccatgtgagtttaacatttgcatatgtgtggggtaaacaggcaggactaaaactagagtttggggcaaactggaaggccccaaaatctgttatctaccgtgaggtgctgcaagatggctatgttcttttagtggcgtaaagaatgatcgtgaggatagccatgaggatggtaaagatcacggagctgatgttcaggcacttggcagtggaggcgtaggtcttggccccagtcacatcacccaccattttcctgtccctagacttcacagagtaggaatacgctatgaagcccaggcagcaaaagttcatgaagagcgtattgaacagggaccagaccacgtggtcaggcgtggagatctcagcaggcatgttgattgtggtggttgtcgcaaaatttgaggtgtggggtcctcccaggataaccaccttttgctgttccttgggcatctcttggcttttgaggatacaggcttggtcctaggagccctacaat

SEQ ID NO: 397 - DNA, 243 bp, Rattus norvegicus
  Genbank Accession No. AI059386
  misc_feature (1)..(243): n = a or c or g or t
tttttttttttttttttacaggtgaaataaatttttattgatcagtataaaatatttcaacacacaatgtcttacatttgatattgtcttcagtctggtgactgtttccttgcaatagttgggatagaatctgaggcctcagacatgacaggcaggtcctccactactaaactatgccccagacccgaggggttctangcaagtgctctcctattgaaacatggccacagctcctcagtggta

SEQ ID NO: 398 - DNA, 3330 bp, Rattus norvegicus
  Genbank Accession No. X51529
tgtgatggaatgaatgactgacacgtgaattaagcagcgtacagaaccagcgttccctttcctatcccccaaagtyacagtttatcagaagaaagaaacatcccagactttcaaacactcattccctcccctgtatacagtccttccatgctcctggaagtggctgccaggaggctgcaggcggtcacacccagatgggcttttggaaagttctccagtcaggagctgcaccctgtttctcatcaaccgaatgaactttcgaaatcagctaaagtttatgatggccacaacccatggtatgagggcttttccggccctcaaggctgttctgccagctgttggggggaaaaggggaaattacccagggcgttgggtatgcccgtctgtgaatccattatttggccacacccacctccccatccctgtggctctccgatccccagccctgcagagggaagagctatttaagagcattgggagtacaggaaaaacaaggcaggcccttgaacaagaagccataccaccatcccatccaagaggtacatgcccagaaactcctgccctttggatgcatttgagtgattgtgcatgtgagcatgtgtgtgtgtatggacgtgcctgtggatgtgaattcccatcaggtaaacatgtacaagaccgcattcctgggcaagtatcttatatgggattgtgagagtgctgggggagaatttgagaatgtgtgtgtttacatgtcatccgtcgtgggttagaaaggaggcatcatatgtataaatatgtaatcgtcacaggcttacaagggcagcatgtgtgcatgtcatttgcatagtgttagaatagaaaggcatcatgtatgtatacacgtagtgggcagagtcagaaaggcttgcaaagagaatgtgcagttttagttggagaggagactgtcaggatcggaccctgtggatggaattcctaagccttgaatctaacttgaggatgtaggtgaagtatatagtggaggcagacattgccttcaacccctccaccccaattctgcagaacgagtcccaggaggactagaggaagtgcaggggtggtcccatcaccacatcattcctgtgtgagggacagttccacggagccaggagggacaagaggtgacattcgaaatgcacggtcggaagccactctgtgtgtactctgtgacttagccccatgcaagtgcacatctgtgctctgggattgctaagtcagacagctgagcaggggctgggtaaagggtaagctgtcctggaaggaagtgaccaggctgtgtgtacctgtccttcacagagctgacagcatgaaggtcctcctgttgctagcagttgtgatcatggcctttggtaagagtggaccctgaactcagcacaatgagagaggtaacctgaggagggaggcaccctatcccctggctttccttcctgtgggcctggccctctcttagtgtgaggaggaagaagccatttgtggggagagaaagtagcagagagatgccatgtggagttggggcacagaggttcaccacccttgaccagcttatttccccatttcctttcaggctcaattcaggtccaggggagccttctggagtttgggcaaatgattctgtttaagacaggaaagagagctgatgttagctatggcttctacggttgccattgtggtgtgggtggcagaggatcccccaaggatgccacagattggtaagaccaccccagtccccctatcctctgtcactccagctggacgggactaagagggagctggtactcactacctcagtgtcccaccgaatcccagccagccgatgttagcagattgggagctctgccctggaccactctaaagttcttgagtctctgctcagaaccaaaggtcaaaggaagtgctggggtaccaggactcaagggccgtgagaaggcagcctcagtaaggtctgtcctccaaccaggtgctgtgtgactcatgactgttgttacaaccgtctggagaaacgtggatgtggcacaaagtttctgacctacaagttctcctaccgagggggccaaatctcctgctctagtaagataccctgagatacctgcccgctttcttcacgggggtgttgagcacacacatgcatgctgggaactttactggtgcaggcttacttacacaagcaggcctgttagcaggacagcagggccaaagatgtagctcagctggctgggtgctagcctagcatacgtgagggcctgggttccaccctcagcagtgtatgaaatgcacaaaatttggcatgacctgaatcccagtgctcatgtgcaggcaggaggatcagaagttcaaggccatcttcagctacttagagaactcaaaggcagcctaagctataaagaccctgtcccctcacccctcgtccctcgcccctcgctcctcccccttccccctctccctcccctcccccccaaaaaaaccctagaagagggtggctagggatcgaggcaaacctctggcagcgccatgtgtggccactgtgtgtccccatcagatggtcagatggggttctgccttcccaggaagcagacagttccccacgagcagccatgagacagtagccatcagctctgtgtccgtttccccctaattgcagcaaaccaggactcctgccggaaacagctgtgccagtgcgataaagctgccgctgaatgttttgcccggaacaagaaaagctacagtttaaagtaccagttctacctcaacaagttttgcaaagggaagacgcccagttgctgaaagagccatcttctgaaacatccagacatcctctaacacctctcctagcccaaccaagttccccagtgatcaagaaaacacccctctccaaccctagaagcaggcgggcccttctgtcttcacccagaaggagccgctgaagcctgatctttccccaacactccacagccttggatccgcccactttcacttttcccttggcatccaacttcctgctgcgtagtacctaagagagtcctgagaggctctcgcaagtaaagcaattcatcaacaaccacgtgtgtgttctcataactcgaaacgagacagatataaaatatgcatgctcaaagtataggccttgaggctggggaggtggctcagtccataaagtgcttgccaaaaaaaaaaaaaaacaaaaaaaacaaaaacacgagggcctatgttcaacccccagaacccagggacatcaagggcattcttgtttgcaatcctagagttggggaaagaaagaaagtggacccctggggctcaatggccagccaggctagc

SEQ ID NO: 399 - DNA, 342 bp, Rattus norvegicus
  Genbank Accession No. AI043999
tttttttttttttttttaagagaagccatattgcagaggcccaccttgaactcgaaatcctcctgcttcagtcttccaagtccggtgttacattatctgtgtcacttagcccagtggcaagttcttcccagcagagttggaggttagtaagcaattattgtttaacgccatgttctcataattcctgattgtcctgttaggaactggtctatttttttcttcttggcctgatcaatgatgatggaggacttatttgtttactgtctggtctcctatcactggaaggcaggacttcagagttgctttggtgactccctttcgttagctgaaccgaaccctcta

SEQ ID NO: 400 - DNA, 388 bp, Rattus norvegicus
  Genbank Accession No. AI044900
tttttttttttttttttgagactgggtacccgcattgttctgaggaggatctgttctttagtgtactggaaacacgaggttaccagcaggcacaacagggaccctttggaacccttacaaaccagaagggtcacataaatgtactgcatgtgaggtggtgagggaaagggacaaggggaaggggttaagaagagaaatctctggtccactgtgactttcttcagcctggacagttgctcttaaaggggtagctttcttccagtgtactgtactcttcagagcagcagacggctgcagggtgtgcagccagcagcagacgtatcagaaagagtaagtcctaaccccttggttagaaaaacaggagacagaagttttaacacccacctta

SEQ ID NO: 401 - DNA, 534 bp, Rattus norvegicus
  Genbank Accession No. AI168975
caaaggttcattgtcacatttattagtagtagctgcagctggactggggcttctatggggactgttgggacaaactttgaggggcaacaacaggagggaacaccattgatggtcagcaagggtcttaaaatgggatacagagcacagtgacggtcaccatggtgctgtcacagcacaaggagctactgggtgctcatttccttcctgaacattccctgagcctcagtccacgatggtcaacgcctcccacaaacctggagcttttggactctggctacttcctggaggtgaagtcacacaggccacgccctgccacccccaatcatggccagtcaattgtcttcagtaggcctcagtactgaacactcgtaactgcctgacacagctgaccctaccctacctagtgacagctggaggcattgtctccattcttgcctgtctgcctgtgacctgagaaagaaatggggaaaagaaacttccactttcccaagaaagctggaaaaaagagagggcagattgtttctgggcaggaac

SEQ ID NO: 402 - DNA, 657 bp, Rattus norvegicus
  Genbank Accession No. AI102065
actgcataagtcaaagatttatatttttgggttctttctagacaaagttcttaaaagaatcacagacgaaagctcatgcataaatcacatatttcctcactaacaaaaatacaaaattgataattttaaaaagatcagttttcagtgacccagatggctgaggaaatgctgcttggcattttttttttcctgatctgacgcagaacatcctaacttgagaacaatgctgccagtcttcacttatttcagaaaaccggcagcgagggatttttgaaggaaagctggaactgaagaagtactgccccttcttgaccccaagtcaggggacacatggcactcttccacgatgttctcagttcagccagtgactcacaccttcacaagccagacctcattacgacgtccatagggcttcatgggagggtcatacccggcgcagtagtagacatcaccctggtaggtggctggtgtgccctccagggtggtacgtagctgggtggcgtgagcaacatagtcggcttccttggcataaccaccgaattgcgtagaatagacagtgatgccctcccgctcctcgattttcacgctctggtcactgggcgttggcgggctgccttgaaattggttcggaatccggaaccagactttcagtttctt

SEQ ID NO: 403 - DNA, 450 bp, Rattus norvegicus
  Genbank Accession No. AI071965
tttttttttttttttttggcaagttcttttgaagtttattttcaaatagccagtaaaaattgacctgagttcaggatggttatgtaaaaacaaaaaacgtgaactaacagtggtggtgtaaactcatctccgagttcacacactggggaccaagtgcaacggccaggcaagattatacagggaaggagaacaagagtctcagccttcggtgagccaccatgcaaggaaagcaacagagtgtcaaacgggagaagcaacagagtctcagctttcagtgatccaccggtggcccctgagctcctgacttaacagtgcctcaacactgtcgcccaggggagagtccaaacacaaaggaactcaacagtgtcctggtgtttttgtaacacacctcttgctatatcaatatagctctgactgtcctgcaaaagaaataacttcagagggggggca

SEQ ID NO: 404 - DNA, 368 bp, Rattus norvegicus
  Genbank Accession No. AI071602
tttttttttttttttttgggtccttttttcggagctggggagaaagccagatcttatggcactatgcaaaagtcaaagtatacagagaggcaagaaccaacaacagtgaggagacagaccactgaaaagtaccaagtgcagactggtagtcaaggtgggaaaccgaaaattcccagactttcttagacttcctaagcatggggccacagagtgaaggcagcttactgcccataactatatgctcgctttgtatccactccactgccacagtgggaaagccagttcactttaatcataaggattgacaaggcaactaatttaccatatccgtggctgtgacaatccacaacactgtcagcaaattcaga

SEQ ID NO: 405 - DNA, 276 bp, Rattus norvegicus
  Genbank Accession No. AA964500
tttttttttttttttttgcatttaaacaacgtggtcgggacatttattggcattatgaaaagatttctttaaatggtataaataatcatgaactcaatctctccatctgttctatttcacgatgataaagcaaatacgggaataagtaacattcctgcttctacaccacagtttaacgcacaataagctaacattccccaaaggattatcaactgcgtcacactgtctctcaacagacagtcaattgtcagtccaaattctaagaaaatttcccgg

SEQ ID NO: 406 - DNA, 577 bp, Rattus norvegicus
  Genbank Accession No. AI232361
ggaatccattaaaagtgtttatttttacacagcaaggagaaagggaagtacatagtcagcctttggcacctttccagtctgtcgcccccatgtccttcccaatacaaagcactggcaagaggggctgcaggacagagtcacaaagtgagtcacaggtgggtaggtggggttccagagcccatctcagacccctcgtcctggagaatcaaagctcaggggcatagggctccccggtgggcgagggcacccgcaactcagcgtcgtgtctcacgactgtgaagagtcctgccacggccagcagagtcgtcaccatgacggccgagcagatgctgaacatattcctggtgcccgtcttccgatcgctgtcatggaggaccaggagccccagacaggccagtaaatgcaggggcactcggaaccaattgagaacaccggcctgctccgtctcggggatcactttcctccgcaggaagctcatgctgggaaagtagagcccgcaggccaactcgataagtaaaaaagcgataaaggattccacggggttttcttggcctgggctggtagagaacctcgtgcc

SEQ ID NO: 407 - DNA, 615 bp, Rattus norvegicus
  Genbank Accession No. AA945601
aaaacaagtttatttattgaaagaatctgaaaatagtaataaggccttcattaacaattaacaaaattttaagatattaacaatatgaaacattaagaatttacgtgaaaattccatgtgtttgagatcagtctggtggcagctgcttctgtacttgtcaacactcgctttttagatgcatggactatgcttcagaccttgctctcctctggatcatagcagagcctgctgtgcgcagtcacagatgaacagcacaggtgaaccgtggggatgagccaccatggcttaacagcactcaagccagaccacttggggctgcacgggtgcccagtaggtcccaactttaacaggtagaagaaagctcagagtagtcggttctatagcagctgacaaaccttccctagaagcatgagacaaaagcctgacttcacctggaaagccagtcaaagaacaggcagtcctccctactcctgccgtaagaggtgagcacaaaactgaaagcggatacctagctgaggtgctggggccgaccactgaccccacaaaggctccagggccagtgtggcactcacgtgcgttacttgcactacatacatgtgttgcacacaggctcca

SEQ ID NO: 408 - DNA, 435 bp, Rattus norvegicus
  Genbank Accession No. AI070173
cagccgcaaaggtcagaacttatttcacagttaggtggactaggcgaggcacagtttgtgattacccctcactagcttaggttgtttgcaaatttataaatgctgtaagttggagctaaatgtcaggagataaaaggttctctgaaggacagcagagtttttctgtacaaacagtctcatttgggcttctcatctgtgctcaccttgaacctacaacctccatgggcagtcagcaggtgggaagacatggtgttcgcccttgtgacttccattttatacacactgggtttgtgtattccagttggctttttagtactagaaatccctcatatgatgtatcagacacaattgaattctaatctagtctgttaatttatctaaagttggagtttttttttttaaagtaataaaaaattaaatgtaaacctcgtgccg

SEQ ID NO: 409 - DNA, 2858 bp, Rattus norvegicus
  Genbank Accession No. U38376
gaattcggcacgagcggaactgtgaagggctcccatcaggctcccgactgacagagagctagaaggcacagagaaacctgaggattctcatttaactctgggaactgcttcaagaagctatagtaccagagaacacctgggaagtgtgagaattcctgcagctgggaccaaaatgtctttcatagatccttatcagcacataatagtggaacaccagtattcccataagtttacagtagtggttctacgtgccaccaaagtaaccaaggggacctttggcgatatgctggacactcctgatccttatgtggaacttttcatctctacaacccctgacagcaggaagcgaacaagacacttcaataatgatataaaccctgtgtggaatgagacctttgagttcattttggatcctaatcaggaaaatgttttggagatcacattgatggatgccaattacgtcatggatgaaaccctaggcacagctacatttcctgtatcttctatgaaggtgggagagaagaaagaagtcccttttattttcaaccaagtcacagaaatgattctggaaatgtctcttgaagtttcgtcatgcccagacctacggttcagcatggcactgtgtgatcaggagaaaacattcaggcagcagaggaaagagaacataaaagagaacatgaagaaacttttgggtccaaaaaagagcgaggggctttattccacacgtgatgtgcctgtggtggccattttgggttccggcgggggtttccgggccatggtgggattctccggtgtgatgaaggcgctctatgaatcagggattttggattgtgcgacctacgttgctggtctgtccggctccacatggtacatgtcaaccttgtactcccaccctgattttccagagaaaggtcctgaggagattaatgaagagctaatgaaaaatgttagccacaaccctctcttacttcttacgccacagaaagttaaaagatatgttgagtctttatggaagaagaaaagttctggccttcctgtcacctttactgacatctttggaatgttaataggagaaacactaattcaaaatagaatagtaccgaccttgagtagcttgaaggaaaaggtcagcgccgcccggtgtcctctgcctctcttcacctgtctccatgtcaaaccggacgtgtcagagctgatgtttgccgattgggtagaatttagtccatacgaaattggcatggcaaaatatggtacctttatgactcctgacctgtttggaagcaaattttttatgggaacagttgtaaaaaaatatgaagaaaaccccttgcatttcttaatgggtgtctggggcagtgccttttctatactgttcaacagagttttgggagtttctggcttacagaataaaggttctacaatggaggaggaattagaaaatattacagcaaagcacattgtgagtaacgacagctctgacagcgatgacgaggcccaaggacccaaaggcaccgagaatgaagatgcggaaagagagtaccaaaatgacaaccaagcaagttgggtccatcggatgctaatggccttggtgagtgactcagctttattcaatacccgagaaggacgtgctgggaaggtgcataacttcatgttgggcttgaatctcaacacatcgtatccactgtctcccctgagagacttcagcccccaagattccttcgatgatgatgaactcgacgcagcggtagcagatccagatgaatttgaacgaatatatgaaccactggatgtcaaaagtaaaaagattcatgttgtagacagtgggctcacgtttaacctgccgtatcccttgattctgcgacctcagagaggtgtggatctcatcatttcctttgacttttctgcaaggccaagtgacaccagccctccattcaaggaacttctgcttgcagagaagtgggctaaaatgaacaagctcccttttccaaagattgatccttacgtgtttgatcgggaaggattgaaggaatgctatgtgtttaaacctaagaatcctgatgtggagaaggattgcacaaccattatccactttgttctggccaacatcaacttcagaaagtacaaggccccaggtgttctgagggaaaccaaggaagagaaagaaatagctgactttgacattttcgatgaccccgaatcgccattttcaaccttcaacttccagtatccaaatcaagcattcaaaaggctacatgatctgatgtacttcaacacactgaacaacattgatgtgataaaggatgccattgttgagagcattgaatacagaagacagaacccatctcgttgctctgtttccctcagtaatgttgaggcaagaaaattcttcaacaaggagttcctaagtaaacccacagcagagtccatttgaattccatgactactggagttcagagcacatgagagatcatcttactatgcacaagagactgactgctactcagagttgtggggacggaggcgtgtgttaggtgaaaacggtgttgattatgcaatacttggcaacagtttctgacagtatgaattttttgacataagcatagggctatatactgtattttaaacattcctcacatttttacctgagcatttttatatatatataaaaatatcctttccttttataaatattaatagtttaactcagtaaaaaaaagcttcccattgtgtgtgaatgttattctgaactagatttgttcatgccatgttacaacactatttttatttaaatgttcatatctacacatgcgaaataaatactttgatatacaaattgccaaaaaaaaaaaaaaaaaaaa

SEQ ID NO: 410 - DNA, 631 bp, Rattus norvegicus
  Genbank Accession No. AI234816
agaacaatttgaaagaataaaaatccaaacagtcctctgaaatgtacaataaaattcagcctggcattgtaaaatactcaatgtttccacaaactatatattttatgtttctccacaccaatgagaacttaggtaacaaatgagttcttcaacacacgagttacgtatgacaaaaggaactggaattttcgtccatgagtttactcaagcatggtttatttaataaggtgtggggtgatcgatgaggacggaaatacaatcaataggtcttcaatctctgtcccacggacacctccatcttcccgcttacgcccagcacaaggcaagttgaggtttatttagacacattctttacaatgaccccttcagaaaaaattagaatacaaatagcactaggcagtcagtaaattaagtcacaggccaagaagttcaactgtgcagttttgaaatctaacgtcagagagttcctgaaaccttaagactgagtgatctgcaatgtctccaacatgtcttcaactgccttaagagaggatttggtttccttcttacttcgacctgcaaactgataagccctgtttatttgattagcagcccaaccagcatatctgatgttgacttttttcatctttgc

SEQ ID NO: 411 - DNA, 494 bp, Rattus norvegicus
  Genbank Accession No. AI045198
tttttttttttttttttgaagaaccaatgtaatggatgctatttcagcatttcccaggataggtataaagatagaaataatttacatagcagatgtccaattgctcataaatttctgaactaccataaaatggtagcagatgaattatagcaggaaagttacacccctttaaattgagcaagcacggggtccaagaaggtctattatcccggacatcagagatcagatgaatgtgtcttcatgatccagagacacggctgatggtccctcatgcccgtgaaagcggcttactctgctttcaagatgatcccatgctgtttagctgggtcttcctttctcaactccacttccagccagccatggttagagccacacgagtacatgacaagaatgtccacatgaaactttaattcaagaagaaaatactttccacaaataatgaaaacaaatttcacaagagaactggtgatattagatgacattgaatactttct

SEQ ID NO: 412 - DNA, 386 bp, Rattus norvegicus
  Genbank Accession No. AA817947
tttttatttttttttttgccaaatacacagatcaactgtttattgagttttgttgttgttgttctaaaatactatacatttaaaggagtttccaaacattaagttcttgacagcgtttggtcattctgtaacttaggaacaaggatttctgctggtaagttctcatgacacagccacagcaaaacagcgctcgtgccaaacactgaagaaacacaagttgtgatgtgcaccattgcacactgtccgagctaacaaaataaaagtcctctttgtgcccatccctggggctcataacagtcccactgcacctgaggacagggcaattggaggaacacgtgtgtgtgtgtgtgtgtgtgtgtgtgtgtgtgtgtgtgtgtgtgtttcgg

SEQ ID NO: 413 - DNA, 171 bp, Rattus norvegicus
  Genbank Accession No. AA925693
tttttttttttttttttgtaaggcgtgcacttttaatacaacggtctcacgtcagtgtacatgccaaccctgactgcctcaacacctcacactactcccagggagaccaacgccttcatacatcaggttggcgggacaataccctggggcaggtcacagtggctgaccatt

SEQ ID NO: 414 - DNA, 566 bp, Rattus norvegicus
  Genbank Accession No. AA818999
  misc_feature (1)..(566): n = a or c or g or t
cggccgcggctgcctgngcggccaccgcggcctggttggcttggtgctgcgcagctttgattttggcctgcaagtgtgcaggagggtgaaaatatttgcatttctccctcatgcaacgcccctttatgtaatccatacaaacggttacggtgttgtcgtttgtgtcgatcatggtgctgtctgccgggtgtgcaaagcggcagtctgtctctccccgggcacagtttcctcgctggaactccctgcatacctccagtttatcggtcctgagaagtttctgagttgcagttgagcccgggacagtgaccggcggacttcccggaacaatgacaggtgtggtgggtagaacctctgttgggactaaccccactccaggggtgacaggcgctaagtaaggagcaaagctaatggccgcatttgtccctatggtgggacctacaggaaaagtgggcacagggtggagcggtgttcctggaaacatgaattgcatctgctgggcaagcatcgctgctgcagttttttgctggatcaaattgttcctcccattgatttctagctgagttttt

SEQ ID NO: 415 - DNA, 553 bp, Rattus norvegicus
  Genbank Accession No. AA799449
cacaactttaatagaatattctaactattctgtacaaattgaaaacaccgtattcagttacaaatgtgttattgggtaaggctgagcacgctctacatggctggtcactgtggacatggctgtcctggctaccagagacacaaccacacactcggaaacaccccccccccccacactaaccaccaactggtcaccaatcccaggtgtggccctggtgtgcacagtacaagctgaagctgtgctctacaggccagagatcctactgagggagaacttcctcgtagaacttagcttctatgtgcgcacacctcacctggagctgcttcagagcattaattcttcttttgacagctttaggtaaagtttctatgtaactagatggagtgtgagagacgttgtcaagacgttcctgcaaagctgccagcacttgtgggttctgcatcacctggtctgtgagtttttctgtattactggcatttttagcagcttccacagaatctgctgggcctccatctgaaagactgtttttctgcatctgaacacctttgcctcg

SEQ ID NO: 416 - DNA, 558 bp, Rattus norvegicus
  Genbank Accession No. AI009002
caacttgctcagtgctttattgaaccaaggccccaacagaggatgcattggcgggccttccagcatgaccttttcatatgtagattctgaacccaaaagttgcttcttcctccctcccctatgacaatatttctttaatatttccaaatgctaagtgtaaagactttgtacacacacacacacacacacacacacacacacacacacacacacactcctgccataggccatcatgcttaccaaaatacttcactcgatttgtgtgcatacatgtgtacaaggcactgtgcatccatgaccatccaacaaagggcctagactctgtcactagtacagcaacacggaaaaaccatgcatactcaggaccagatatggaaagaaggacagagagggacagggagggacagagaaggaccaaaaagtgaagctcagtgactggttcattgcccagcaacaagtgctgaccagcgaggctttagggttcacagcagtgaggatggggctcccagaggctcctgaatcaggcctttgctctacctctgggggtcttaaaggaaa

SEQ ID NO: 417 - DNA, 605 bp, Rattus norvegicus
  Genbank Accession No. AI012352
aaatgtaagctactaatattttaacaaaaaaataacccccaaagttgcatatttatattgtacacaaactgaaacaaggtgcctttagcacagtggacacatgctcacataaactcaatagttacacttaaaacaatttgcattaacacaggaaaagttctgaaatacataaaagcattaatatcttcataaaactatagtgagaacaccaatttgctataagcgtataaaacaccaatgctctctccgtgtttcaagttcttgtcacagcatctcctgctcagtcttcctccagtcctcagcgtagactcctccttcctgacgacgctcatttcccaggtacattgtaagctcaagaaaacagacccaacaattatgcaatataattacgtcacaacaacttaattgcacattatgctttgaaagtaggtttggatgaagttctcaaacactttggtatatgttcctcagggacgtctactacagtaacagaaagatctaagttcctttcatccccattctgcattaaaatgaacaagtctttggttaaaggtccacatttcaggcatttatcttcaattaaaatggtccccaaaccactaaac

SEQ ID NO: 418 - DNA, 490 bp, Rattus norvegicus
  Genbank Accession No. AI175100
accttttctttctaagcttttattttttgatattacaaaccagttttctttattcacaaaccactgtaagtgatataaacactaatttctaaagacagatatacacattttctgggtttgcagattgagtgatgtgtgttaagaagtcactatatgccacattaatcttttttccataattcataatagcaatagttatttagataaatgaaaacattccaaataaatactgttgttttaaaaaatccaaaatgtttgtttacacctctgacatgacagtttaaaacgacttatcggcagctcagcggagtgcctagacaaaaggttctgcgacatcggttggcacccacttgctctaaatgatttttattaaaactacatacggtcgtgggggaaagtacagttcgttgatggaaatcaaaaccgcatatgagttttactttagccagcacagtaagaattccatgtttgtgatttcatacacaatgca

SEQ ID NO: 419 - DNA, 502 bp, Rattus norvegicus
  Genbank Accession No. AI112118
tttttttttttttttttgaagagagattggaactttattgagacgttctccctgatgaaatcagaatagaaaggacactggaaaggtcagccactcttcaggcacagacacagatgttcccctcaggaaatctctgcatcccacgtttttccctcctcctagtcagaatcctgctcaaaacccagctctgcacggccaggcaaagattgagtgctgaaagctgtgggactgtcagcggcctgtgagtgggagagagacagaatggaggcagagaagaaatggatggagagaaatccaaaaggaaggaaggtaccactagtcaggtgcctccccccaaacgcaaatgctgtaagaattcattggcctcatttcacctgcttcccccgaagcatgcaggcactgacagctatgacaggctccatacagttcagctttttcccccgtttctgcattgagagaaaaacagatttgccacacaaaactcacaggcatgaggggcagg

SEQ ID NO: 420 - DNA, 599 bp, Rattus norvegicus
  Genbank Accession No. AI102520
aaggtaagcaattattttatttccctggcctgacagcaattgacttcaaagtcccagaacctgatgccgacaaagcgaacatacagatagctcccaacagggaggacgctcttcatttgtagagatgaattgaaatgtcatgtgtgaatgcgattcctgatgtcttcaccttgcgtctcctccatggttgggagccctccctctggttccccaagtcccacacgcacccctcccctacccccaagtccaggtgctcccatctgctgggcttctgcctcatttcccatagacactttcatcactgtaggccacatacagaaaatagtcttcctcgtggttgtcctcatacagctgtcccatggtagcactggtgggagggatagtgttgttgacaaagaagaataaggcgtcctcaggtctcaggtggatcctcttccggattaagaagtagaactccactttaacgccatccaaactgctggcaatcataaccacattccgaacagccctattttccaagaggactccatctaaatgtccgtgcgaatgtctactgccacaactggggcggtgctatgacacctgggcggaggaaaagg

SEQ ID NO: 421 - DNA, 522 bp, Rattus norvegicus
  Genbank Accession No. AI232613
ataaattaagggtttattacaaaataaaaagtgttaagtttctccttgtcagtgattcaagaaaacaaagccagaagccttttgtggagccgaagccaggacctctgtgtgcaggctggtggtcaaaagccaggctcatgagcgggcagacagacactgattaacgacctctagcaggtgggtattctccagggcagctgccactcgctccttatctgcaagttgtttgttcactgcatgctctgaggcgtgggtgcccggcgtaatgtgcacatccatcttgaaccgctggggaagggatcgcagaagcttgactttgatagaaaggcctataagtgtggccatgctgcagtgagggatggtgggtgtgaaggccactgctactgtgctctccgggtcgctaacctgaattcgaacctgctctactacgttcaattcctccagtgtcagtggatgctccgggtcattaatggagcgaataagatcgaagatctcccgggcatcgatgctgtccggcacttc

SEQ ID NO: 422 - DNA, 664 bp, Rattus norvegicus
  Genbank Accession No. X53504
ctttcggttcggaggaggcaacggtgcaactttcttcggtcgtcccgaatccgggttcatccgacaccagccacctccaccatgccgcccaagttcgaccccaacgagatcaaagtcgtgtacttgaggtgcaccggaggcgaggtcggcgccacatccgccttggcccctaagatcggtcctctgggtctgtctcccaaaaaagttggtgatgacatcgccaaggctaccggtgactggaaaggcctcaggattacagtgaaactgaccatccagaacagacaggcccagattgaggtggtgccctctgcctctgccctgatcatcaaagccctcaaggagccaccaagagacaggaagaagcagaaaaacattaaacacaatggaaacatcacttttgatgagattgtcaacattgcccggcagatgagacaccggtctttggccagagaactttctggaactatcaaggagatcctgggtactgcacagtctgtgggctgcaatgtggacggccgccaccctcatgacatcatagatgacatcaacagtggtgcggtggagtgcccagctagttaagaagcaacgagaaggggttgggaatttagctcagtggtagagcgcttgccaagcccaaggccctgggttcagtccccagctccgg

SEQ ID NO: 423 - DNA, 476 bp, Rattus norvegicus
  Genbank Accession No. AA997015
  misc_feature (1)..(476): n = a or c or g or t
tttttttttttttttttcaactgcacagtccaaatttattatgtgaatgaatgataacaagtaacattgagagtggatgggtgggagtgggaacatcttcagagaagcaggggaaggggttgggagaggggagaaagtggataacatttgaaatgtaagtacacaaaacatccaataaaaataaaaacagtaaaattggatgactaggtagctgtttttctatctcacaagttcacaggcagaaaaacaagcatatggtatgatactaaaccatgccatgggtgttgacaccatacaatgcacggatcccatcttaaatttccactttctcagttaaggctancanggctgagctaaagaattttgtggtatttgggttcagtaaagtcctaatacaagcaaggcatgagtctacttctgagagccacttgcaccactgaatgtactcactatgaaagatagctccccagtctttt

SEQ ID NO: 424 - DNA, 711 bp, Rattus norvegicus
  Genbank Accession No. AI171807
  misc_feature (1)..(711): n = a or c or g or t
gtatagaattagctttattagactggttttacagaaagcagccagattagtttctctgcctacctaaaatacaagttacgtgcatccagattattcttaaacatgctgtagcaaagtctgtatttaagatgaattctaagactctttcttagagcaaagagaggtgctccatgatacatcccccgagggaatgttcatgcagtgggcacaatggcaaactctcttccaccaggctcgtcttcagtgagctgtgttcatccctgacctcacactggtaactccctaccccaggacagacttcacactacaacgttcacagcagcgcacaggtacactgctcgctgtgagaggatgggaaatttagcaagtgttaatttcctggcagatacacatacatagggagctcagtcctgccgggcccaggcttccatgcccaacttgaatggtgatggtgccagccttgtagtgtgaattctggtctctctgaccctgacctggccttcctgtgcccgactttcatcatctaacttcaatcctggcattttagcaattctaggctggttttgccaagaaggcaactgaataccagagcaaagcacgtacagtcccatgaggattatacacgtgaaaagactcanaacaggattacctagtataaaaatataacgataacacatcacaagtagagtataaacagtcctctgagtgaac

SEQ ID NO: 425 - DNA, 374 bp, Rattus norvegicus
  Genbank Accession No. AI144591
tttttttttttttttttggattttacaaaaaagtttattaactgttctcctctttctcataaatggaatggataattctttacaaaccagtactcatttaagaaattttaaggagttgccaaaatcacatattgaataacaattccaaagagcaatgggaagccaaatgatattaataatggagtagaggactgacttctgaggcattctagttcagtgcagctatgcaagatgaagtgtttggggaatctcaaaaatggagtttgtctgtctagtaataaaatgaggagaactcggaggaaaggcagaggagccaaatcaaactccacaacaagaacacagcactgacagaaaacctatgaacctctggaatt

SEQ ID NO: 426 - DNA, 312 bp, Rattus norvegicus
  Genbank Accession No. AI072906
tttttttttttttttttaatttttaaatgaattatgctttatttatttattttctgtgttttctatgtcttaggtgacccctatgaaagggtcattcagtctcaaaggggtttcaaagcagggcaccaggtccagcttccatcatgacatcctgtgacacttcagaagtggaggcaggaggatcaggagttcaaactcattgtacttagtttgaggccagcctgggctatattggaccacgtctcgcacaaaacaaaaacacctaccctctgtatccctgaagggagaatggatcaagggggacactggtta

SEQ ID NO: 427 - DNA, 552 bp, Rattus norvegicus
  Genbank Accession No. AI236338
  misc_feature (1)..(552): n = a or c or g or t
cgccttagcatttacttctatcccatattcttggaactgtcttcaccagagctcaacgggagatggcaaagatgctggctctccctccaagaacagctgtggagctgcctgggaagattcacacgtcaagaaatcgggaagatgcggcaagggtgggcagccgcctgtagtcagccagcatctcttagaacgggctgggttgcagcccaagtctctcacagaggtgtaggcagtgcctgcacctcctccaggcacttgtcataggcctcctgatagtcttcatggggcttcaccatgatcacacaagtgggacgttcgatcctgtagctgcacccaagtccgtcttagagggaatatagacgtagggcaagttctggtcctcgcacataactggaagatggcagtacacctcaatcggcaacgtatctcctgccaagaccatgatccctttctcgcccttgttgacaaatttctgaacttccttcaccccgcgacgaatctgcttctgctttacggccttcttgatgcatttgtnaagcttgcgcgtcaggc

SEQ ID NO: 428 - DNA, 400 bp, Rattus norvegicus
  Genbank Accession No. AA944773
cctactcggtaataagattttataatttaaactgatctttaccatatccttgtcacagtttgtctgagacatcacgctggaagggggaatttctcaacccctgagggaggagagatggcagacggtgaaagatgaagaaatggcgaggcagaacgcactacgttggcttggggtcctgagttctccatgagacagatgactgcaatagcttccgaccgacacacatccgttttagatccactcttcagagatggcttgcttattttattgaaagaaaaactattcaaaatgcacggtaagaaactagacttttatcagtacacaaataagtttacttaaaatcaactcaattccatgtttaaaaagtttgtaacattcttccagtgatgtctgcaaccca

SEQ ID NO: 429 - DNA, 744 bp, Rattus norvegicus
  Genbank Accession No. X58465
ctcttcctgtctgtgccagaactgcgcgtggtccgcgccgatcgactgagaagcccggtttgcgctctcagaatgactgaatgggaaacagccacacccgcggtggcagagaccccggacatcaagctctttgggaaatggagcactgatgatgtgcagatcaacgatatttctctacaggattacattgctgtgaaggagaagtatgccaagtacctgccccacagtgcaggacggtatgctgccaacggtttccgcaaagcacagtgtcccatcgtggagcgccttactaactccatgatgatgcacggtcgtaacaacggcaagaagctcatgactgtacgaattgtcaagcatgcctttgagatcatccacctgctcactggtgagaaccctctgcaggtcctggtgaatgctatcatcaacagtggcccccgagaagactcaacacgcattgggcgggctggaacagtgagacggcaggctgtggatgtatccccacttcgccgagtgaatcaggccatctggctgctgtgcacgggggctcgtgaggctgctttccggaacatcaagaccatcgctgagtgccttgcagatgagctcattaatgctcgcaagggctcctccaactcctatgctatcaagaagaaagatgaactggagcgtgtggccaagtctaaccgctgatttcccagctgctgcctaataaattgtgtgccctttgggacagttacatcaaaaaaa

SEQ ID NO: 430 - DNA, 443 bp, Rattus norvegicus
  Genbank Accession No. AI044747
tttttttttttttttttacaaagattttatttattttgtgtgagtacacttttgtctctttattaatccaagaacatgactgggttctctgctgaagacaccgagataagcatcaggactaaatgcttggaaaatgagaggttagctccattgggcgcttgggattcccatctgcagagaacgcaccaaacgccgcccccaccctgtatgttgtactgtcacacgcacaaacaagcttgtaagcagctccctttatttgagtaaatagcttgtaaataaatcattggtaaacattacaaaattaaatacattttcaaaagcttgccagtatacagaaaattcacaaacatagttcttttaaaaaataaaatatgtttaaagcacccttgatataaattgcctggtccctgttttcagacagggtcacctggagacttcttatg

SEQ ID NO: 431 - DNA, 618 bp, Rattus norvegicus
  Genbank Accession No. AI177366
gtattttaggccttttattttaataaataacttcagttaacagcactgtcaaaattaaaaggcacttaaaacaaggtggtgactagcttgagtcagggcgagcacagcagggaaggcacgtgcaggaggtgcacagtggtcgaattgctgctgaggggccctgcccaggccctacagtcctgcaagcagcaggacggcttacagtatttgtgaaaaaggcaaatgtacagccacagaaaagaaaaggttataatagagtctgacccccaaattgcaaacagacacattagagattagaggtgataaaggagcaccaggaattaaagaaaaacaaagcagaacaggcccctgctccacaatgctactaaagttatggccttatgtaaatagtgctaagtcagggactttttagcagagaagttcccagtacttttatccaagcttggatttataaagagaaagcgttgggagttacaggatcaagtaactcacaatggcacacaggttttaaagctaagttttcctttccacatctcagaatttttccaatggacttgtaaatcaactgtgtcaaatttattttaattggaaactgtcaacacacttgtcttccgcacg

SEQ ID NO: 432 - DNA, 432 bp, Rattus norvegicus
  Genbank Accession No. AI178069
ccaaaaaattttattgggggaaaactacaaaacatttacagtacaatgtttacagtcacaatttgtagtgaactgattccccaaaatatattacaactcaagttgacttatctcgttacattcaaaaacctacttctgtcaaagtagtccagagtgcactcgtggtgctccaactgtacctacggcacaaactaagcggctgatcattcatttgtcatccggcaaagccgggagactttcctgcctctttacaatgaaaaataatagtacaagttctggactgtcattaagcaaggtatattcgtgtaccaccaacaattcagcgtgaagacctggcctcttcacatcatagctatggttaaaaaaaaaagtggtaaaattcttttcctcttgtgcaggctaacccatcccacattcaaattctcaagcact

SEQ ID NO: 433 - DNA, 1316 bp, Rattus norvegicus
  Genbank Accession No. X62166
cgagacatatcggcggcgtgtggcggcgagatgtctcacaggaaattctcagctcctaggcatgggtccttgggcttcttgcctcggaagcgcagcagccggcatcgtggaaaagtgaagagcttccctaaggatgacccttccaagcctgttcacctcacagccttcctagggtacaaggctggcatgacccacattgtccgggaagttgaccggccaggatctaaggtgaataagaaagaagttgtggaggctgtgaccattgtggaaaccccacccatggtggttgtgggtattgtgggatatgtagaaaccccacgaggcctccggaccttcaagactgtatttgctgagcacatcagcgatgagtgtaaaaggcgtttctataagaattggcacaaatctaagaagaaggcttttaccaagtactgtaagaaatggcaagatgacacaggcaagaagcagctggagaaggacttcaacagcatgaagaagtactgccaggtcatccgcataattgctcacactcagatgcgcctgcttcctctgcgccagaagaaggcacacttgatggagatccaggtgaatgggggcactgtagctgagaagctagactgggcccgagagaggctggagcagcaggtccctgtgaaccaggtgtttgggcaagatgagatgattgacgtcatcggcgtgacaaagggcaaaggctacaaaggggtgaccagtcgttggcatacaaagaagctgccccgaaagacccacagaggtctgcgcaaagttgcttgtattggagcttggcatcctgcccgtgtagccttctctgtggctcgagctgggcagaaaggctaccatcaccgaacagagatcaacaagaagatttacaagattggtcaaggctacctcatcaaggatggtaagctgatcaagaacaatgcatctactgactacgacctgtctgacaagagcatcaacccactgggtggctttgtccattatggtgaggtgaccaatgacttcatcatgctcaaaggctgtgtggtgggaaccaagaagcgagtgcttactctccggaagtccttgctggtccagaccaagcgtcgggctcttgagaagattgacctgaagttcattgacaccacctccaaattcggacatggtcgcttccagaccatggaggaaaagaaagcattcatgggaccgctcaagaaagatcgcattgccaaggaggaaggtgcctgatgccaggagtactttgtgcagctggtggggtctcatcaataaaatattttcaattaaaaaaaaaaaaaaaaaaa

SEQ ID NO: 434 - DNA, 499 bp, Rattus norvegicus
  Genbank Accession No. X58200
ctctttccggacgctcaagatgtcgaagcgaggacgtggtgggtcctccggagcgaaattccggatttccctgggtcttccggtaggagctgtgatcaactgtgctgacaacacaggagccaaaaacctgtatatcatctctgtgaagggaatcaagggacggctgaacagacttcctgctgctggtgtgggcgacatggtgatggccacagttaagaaaggcaaaccagaactaaggaaaaaggtacatcctgcagtggtgattcgacaacgaaagtcatatcgaagaaaagacggggtgttcctttattttgaagataatgcaggggtcatagtaaacaataaaggcgagatgaaaggttctgctatcacaggtccagttgcaaaggagtgtgcagacttgtggcccaggattgcatccaatgcaggaagcattgcctgattctccagtgtgtttgtaaaatatattcattaaagtcttctctctgaaaaaaaaaaa

SEQ ID NO: 435 - DNA, 512 bp, Rattus norvegicus
  Genbank Accession No. AA900295
tttttttttttttttttggttccagactagaatgctttattcaagagaatctggcttggcagttagacagtcccggaagagacaactggtgggctgcaagggccctccaggaattggttcgcttttcatagctgtgcacatggcccagacttgcagtggtcaaagtccatgggctagtactcctcatgcagcctgccctctgttcagccccgggccactctgcctgtgtcccagagaggggacagcttggtggtgctttgcaaagggtgaagcgtgaacttctaggctgacaggcaaagcccacaggcgagctctgtcctccagagccaaatatcccgtcctgatctccaggatacagtagactgggtcccctccacatgtcttcaatgcagccagggccggagctgctgtctgggtggaacagaggaccaaggcaagctctgggtctcctcttttcttctccagttccctggagacccaaggcctctggggtgtggcttatccctagtacg

SEQ ID NO: 436 - DNA, 501 bp, Rattus norvegicus
  Genbank Accession No. AA955206
ttttttttttttattttacaaggctttaatgagacatgaaatgtaacattaattatacatcaatgaaaagaaatcctaaacgagagtttattgtaatcacacatatccattccagcttgaaaactttctgaggggcgaggggcagctattaagagccccggaccagccagcactgtgtgtgactcccatgcatcctgtgctttgtacacaagttctgtccatcagaggctgaagacatttgctgcattattacttttcagaaaaatggctttctcattcggtgatgggtgactcaaccagattcctaagaaattagttccactcagcattttaaaggataagaatgttcagccaaaaagcgatagttaagaccagcgttagccaccgagatgaagccaagactctaaaacacagacttgccaatagtgtccacctatgaggactggcatacattagtgaatagttaaggccaaggactattccaaccctcgtgccgaattc

SEQ ID NO: 437 - DNA, 580 bp, Rattus norvegicus
  Genbank Accession No. AA942706
  misc_feature (1)..(580): n = a or c or g or t
aatgaatgcctgcttttaatatctctctatgatgtacagtcaacttgtgccttcaaggtcattcaaatttttatagcaaaaaagcagtatcatttagcagcaattaaagcgccttcaagaagacttaaaaaaaatacaatatccaattagaaaagcagtatttttaaacatttgtacaagaataagctgctgaaactcagtaattgtaatcgacatctgtacagtagtttacaatagagccagaaggggattcatcattatcttgcacacgactggcctgcttttggttacacactgtctcctgttttaatgaacgaggcctagaaacaaaagaaaaatgcctgttaattctaaaacactgaaagccctggaaatactatgatttagtaacttcaactgatttgaaataggcagctctttgtgttaaaagtataaagtatccagaaatgacagctcgcctttaacaaaaccagttaagaggggtagggggtagggtggtggaccactgacatgtgatttcgaggtacaacttggtaaaagccagaatcggcaaatgacaaagtccacaactgtccanaga

SEQ ID NO: 438 - DNA, 430 bp, Rattus norvegicus
  Genbank Accession No. AA943273
  misc_feature (1)..(430): n = a or c or g or t
aaaaggtatccgtcattgtacaattaattaacatagaaatcagtttttactcgagagaatttaggattactcatgaagtcggataaattgatctcatctgtattttaaaagccaccaaactcaggtcccagcaaacaaaacatgggatttcagaagtgcaactagaaactagaaggtgggccctcagttagtagacttggggacactataagaacagtcactttcaaatgtctggcttgaattgttataatgaaaaaccatctccaaaagtttaaacaacacactcagacctcttagaacctcacagcttagcagatctggtaagggaagaggtagtctgtgtttaggttgttgtgggaatgtgataactgttttatttatcgaaggagctgttcctggtggtgtgcctgacccccacttgcanaggtcc

SEQ ID NO: 439 - DNA, 442 bp, Rattus norvegicus
  Genbank Accession No. AI012739
aatcacaaaaacactttattttgaagcaacagcatatatacttcttgggaattcattgcaggtcacttgtctctatgcactagtgaataaaattgatatgatgaaagacccatgccataacagggattctgaaaacaaggactgttaatgggtaactgttgatattaattgcagggtacaagaaagtgttgcccctttgctccatcacaatctcctgaaacattctgttatcttaatgagaaatatctgggactctggccactgtttgcaggtctgagctgtggatgaagccaaggtcatgaaaatcaataggatgacattaacacatccattcaactcatactggtattcattgtataaacagtctacatttttagtaacaagcattgctaccttgtgatgattgtattttctgcattatcaagaagacataccctctgct

SEQ ID NO: 440 - DNA, 504 bp, Rattus norvegicus
  Genbank Accession No. AA899121
cggacgcggagccgccacccagaccctgtcgcgcgggaggcgggatccgcacgaaataagtcataatgagttacgcagaaaagcccgatgaaataaccaaagatgaatggatggaaaagctcaacaacttacatgttcagcgcgcagacatgaaccgactcatcatgaactacttagtcacagagggctttaaggaagcagcagagaaatttcggatggagtcagggatcgaaccaagtgtggacctagaaacactcgatgagcgaatcaagattcgggagatgattctgaagggtcagatccaggaggctattgccttgatcaacagcctccacccagagctcctagacacaaaccggtatctttacttccacctgcagcaacagcacctgatcgagcttatccgtcagcgagagacagaagcagctttggagtttgcccagacgcaactggcagagcaaggtgaggaaagcagagaatgcctcacagaaatggagcgcacat

SEQ ID NO: 441 - DNA, 646 bp, Rattus norvegicus
  Genbank Accession No. AA849740
tttttttttcaccatgggaagcagcttttattgacaggttgtctccagaaatcaaaaagctatatgctgtcagttacaccccaggtctccaaaatgcctccagggctctgcttggagaagggatacaaaccgcctctttcaaggcccaaatctttcacctctctgtacagcttaatttagcaactttgtgaccttgcccttttgttgggttttgttatttgtccctccagctactttgtaatggccagaggtgacccttgaaggaatcatgagaaaggaggaaacagaatcagagtctagcaacagtccctctgtcctgcctcagaagcttcatccttcattggttgcatttttctttgtgctggatcacacccttctgaatcagatcagggacttccactgccagccaaggacccagccccagggccatgaggtgagctagtccaaacttgggcacattcctggcccacaaaggtttgaaatgatcagttagacatattttgccacccctgtacatctttgccgttttcccatccagctcagggactgcaatttctggagcagtagtgggatatgtgataggaatttcaaactcgatgtcaaactcgtatttgaggaagtcgtggatgtaccagcattttccaaa

SEQ ID NO: 442 - DNA, 308 bp, Rattus norvegicus
  Genbank Accession No. AA866240
tttttttttttaaatttaaagggaacctttattttaacccaggaatgggtacacaatgacacaagggatcaaaaattgttatatgaaaaaaataatacaagtggatttgtgcaaaaaccccaaaaactgcaagtgctttcgggatcttaaaacaaaattcaggatgggtgataaagggaagggactgggtaaaaacctgaaggggatttcaaaagggaacacatttaaacccaaaatgcccgatttattcaggaaggaatgaaccaaacctggaaaatgggtggcaaaaaggcaaaaccattcaaaac

SEQ ID NO: 443 - DNA, 478 bp, Rattus norvegicus
  Genbank Accession No. AI171359
aaagcaaatgacaaaaacccaaattaccagctttttttttttaaacctaagcttaacattacatatttaaacaatagtcaaactgacgaggttgccagcatccatgcacaactagaaaacatccttaatttacactaaaccagaaatgtattaccattgatgcagtaatagcttacatcactaaatactgaaaataaagttgaaatatttctgtagacattcatctggcaatggtaacttcacagcaggctgacactactcacaattcaacacagtgggaagcaaatccatgctggggttaaagacaatctcgtcctagcactactcaggagtcacagagctcacctcaaatcacgttttgtttaaagcaaagggcatacagagattacaacaattttaaagaccaaaaaaaaaaaaaaaaaggaaaaaggaaaaaggaaaaagaaagggcctattttggggtcccaacaacaaactc

SEQ ID NO: 444 - DNA, 516 bp, Rattus norvegicus
  Genbank Accession No. AA923994
  misc_feature (1)..(516): n = a or c or g or t
tttttttttttttttttaaattttatttcagaaaggagggcagacataggagcttagaaggaaatggagccagactcagaggtcccacccaggcaggagcaggaggaggctgctctgggaggggctccaagggggaggcactttagtacactttggctgggccctggcttctacaagggacagccctgtgttgggaggacctgtgggaggcttcatcctgaggccactatgtgctaagagttgttgtcaggagtcttggcttcagggaccctaccggagctggggtcagcttaggtctgctgggaggatgtgggtaactagctccttgggtgcccggatggggcacaagacatggacactggctgtaggctgctgagtaagcctaccacaggtacaagcttcctgngaatgtcctcagcaaagccctggtccccagccttgcctatcccaacattgcttactgaaggagctcatgaaccagtcaactcaagagtccctttctggggaatatgttta

SEQ ID NO: 445 - DNA, 547 bp, Rattus norvegicus
  Genbank Accession No. AI179264
aaatttctccaaatctattcatgggacaacagatacacatgggtataaataaaatgctcatacaactagttagtgtggtgagttcctgggcatcctaacaggcccgtaagcaaaggctggctctcccctactcctttttatgtgaatacagacaggagtccttgggctgaggacaccccatatcctcacacctaacctgaatacctgccctgtaagatgatcgaagaagggctgtgggtagagagccatcctccactttctgtaagatttgcttgcaggagaaggtcggagcctgagaagggcatctctgaagaaagatcaaggagtggccagtgcgggggttgctctgcttgagccatgtggttcaggcaggaaacattgctgggggccaggaatgtatgttctgagctctccaactggtttgtgctgcccattggtagctctggctgtagggcagacagcttcggctgatgctggtcctcgctgggcaaggcacgaatcttgcggtgcaacacaacatactcagcgggcacactccccctcgcat

SEQ ID NO: 446 - DNA, 454 bp, Rattus norvegicus
  Genbank Accession No. AI177482
ggacgtggaaaccaggtatttaatattttcattaaattgtttcaatacaattcccaacaaatgccaactgcaagacaatgtccaaaaactctgaagaagcaagctcccagacaaggaacaaggccatcatcttccactctagccacaatacttctctccatactcgtgccagtcagccagcctcatccagattatcgagtatttaccacatcatcaattttcagaatgctccgcacagtttcagttgctagggtcaacgcactgactgacaccaacagaggctggacaaccatttcctccagaatgttggagatcccaccctttcggacattaatgcctgtagttttttctccttgggcatggcggtttcttagctctgttacagtagagatgggattcaggccagcattttcagccagtgtagatggaatgacttccatggcatctgcaaaaa

SEQ ID NO: 447 - DNA, 611 bp, Rattus norvegicus
  Genbank Accession No. AI228596
caaaaataaacaatttaactttattaagtcatgacttcagcccttacatggatttgttttttaaaaaaatatcagttcagactattattgaaagtgactatgcacaataaataggaatggcctgcgtgtgctgcagacatgggacacaaaaggttggatgcaatcagcaaagagtgcaaagcacctgggaggaagtttcaaatgtctagaaaagtagctcagagctctggaccactcaccaaataaaacaaaaagcaaaaacaaacaaaacaaaaaccccactcagtacatctggcaaacaacttcccaacaacactgaactatctcctgcgacccataagaacaatttaaaatacccaaagtgctaagacctcattagcagtactttaaatctgagttttaatgttaaatatgattactcgaataccctaaactgtatgacatgcctaataacaataagttacaaatattcaacctaataacttagacatgatatggttaatataacagacattgtatctcagctaacctttcatgtaaggtgagaattaaaagacttgttcatctgtgcactcaaatgaggaatgtggtatcctagcaacagtgatgac

SEQ ID NO: 448 - DNA, 540 bp, Rattus norvegicus
  Genbank Accession No. AA849687
ttttttttttttttttcatgacacattcaatatactttatttaaaagtttctttgtataaatttcctaaaaattttaaacattgaatcccacctccaagctccaagacaacagcattgaaaaataatccgccttagaggaccaccaaaaagattctccattatgactttccttgaattctttaatggaggcatttgtcccagcgacgtgcacaggaaaggggtctgatttcttttaattagatcatttgtcagaggacttagaagaaaattgcatcaaagtctaatccaggaaactggggccatgagaaggttagacttttgtttctccatctaagccatgcaactacagaggaatgaaccaagcacaaatgtacagagtagctgtgaggtcaagcctatgttctagacacggggtttgcctggcacaggcatagcatggaattccacagggaatgtgaattcataggaatgttcacataaacaccagcagtggctagctattacacagtgggccacgtatacggtagaactgcctggag

SEQ ID NO: 449 - DNA, 524 bp, Rattus norvegicus
  Genbank Accession No. AI177967
acaaaataggtggtttaattgaaaattgtataaaagggcaagaaatgtgtcagggaacccaggacaggcccagggcactggtgggaggggctaggcatgatgaactggtgccatagaaggcacccctctgtgtccgtccatcctacatcgagactgtctgacatcctcacacacatgcagactagaggaaggctaggtgcactctggaagctcctagtgctcagttataatgggaggctaggcgcacgcagctgctcaggcccgaggtcgagcaggcgcacagtgatgtggttggtgcgtgggtgcaaatcccggacggcaaatacagcggaaggaaccatcagtgttgacacagcgcgcattgacgcagagtggggaggttgcctcagcctcgtcacactcgttgatgtcgacgcaggacatgcgggtgatgtccaggcggtagccgtcgaaacaatcacaggtgaagccttctggaacacgtacacagcggccgtgggcgcagccatccaggataccacact

SEQ ID NO: 450 - DNA, 589 bp, Rattus norvegicus
  Genbank Accession No. AI179399
  misc_feature (1)..(589): n = a or c or g or t
ttactttttgtaaaggtggtcattgtcgttgttttaatctaaactgccatattgaaaaaaattaagtcaattaaacttgagaattgtaagtaaaataaatattctgaaggataaggtggtcaggcacttcagatcatatgtacaaagctgatgcaggaccagccattacttcaagagtctcaggatgaacttcaaacagtcacagttcttgtgttggtcattgatggtagtctcgatacttctggacttctgttacatgaaacaaactggcccaatttcaaagccaaattcctggtctgcattgccaatatccacaggaccgatatctatgatgggcaagcgggccacattctgtgttctgtattcaaagacagtcttgcctacatttccatttcgctttgaacaggtatcttgaagaacggtgtatctgaatctgatgtttccttctccttttatttctaagtcatttgaccctttaagaaccacagctttcttgaggtttttagtttgatcatccatataaccaacagtgttccctcgtgccgaattcttggnctcgagggccaaattccctatagtgagtcgtatt

SEQ ID NO: 451 - DNA, 590 bp, Rattus norvegicus
  Genbank Accession No. AA799599
  misc_feature (1)..(590): n = a or c or g or t
aacggccacaatagtttatttacaattgaactctttataagatatttacaagacagccgactttacacatcagaaatggtatcaaaagtatgaattacagcacagacaacgatatgaaacaggcataaaacaaagctgaggtggagagacaagcactttctcttttaatttattaacactagcttaaactttgttaaagaaagagtaaggaactatgttttaggagaactgcagggcctctctttctgttgaaggctgaatctcacacagtgttgtatcccatgtaggggaaaataaaattaattccccacacactccacacactgtgctctcgctcctggaactttgctccaacctcctcctcaaccaacctcagcatctccaaaccanaagacagctaggagaggacataatcaaatattaggtcctcagggaaaggagaaccaaagcaatagaatccacttcagtcctgccagatagcacctcatggattcctctcagtctagcanaaacaggatatgaggactcctctgaatagggcagaaactggcggttagtctattaacccataccaaattaggaatcgacaa

SEQ ID NO: 452 - DNA, 912 bp, Rattus norvegicus
  Genbank Accession No. M24542
tcccgcggggtggcgggagcgctgcggcccctgctgcaaagcgcggtgcccgccacctcggaaccaccggttctggacgtgaagcgacccttcctgtgccgtgagtcgctgagtggccaggccgcgacccgtcctttggtggccacagtgggcctgaatgttcctgcttctgttcgttattcccacacagacatcaaggtgcccgacttctctgactatcgccgtgctgaagttctagatagcacaaagtcttctaaagagagcagtgaggctagaaaaggcttctcttacttggtaactgcaactactactgtgggtgttgcatacgctgcgaaaaatgcagtctcccagtttgtttccagcatgagtgcttctgcggatgtactggccatgtcgaagatcgagatcaagttgtctgatattccagaggggaagaacatggcttttaaatggagaggcaaacctctgtttgtgcgccatagaaccaagaaggagattgaccaggaagctgcagttgaagtgtcccagttaagggacccacagcatgatttagagcgtgtaaagaagcctgaatgggttattctgatcggtgtctgtactcatcttggttgtgtacccattgcaaacgcaggagattttggtggctactattgcccctgccatgggtcacactatgatgcttctggcaggatcaggaagggccctgcacctctcaacctggaagtacctacctatgagttcaccagtggtgatgtagttgttgtgggttagacacttggactgagggcctaggtttctttcggtcttcatgtcccctcagaagagttgagagtaagccttgtacttctaggttggttgatttaaaatatttaagaattgttaataactattggcaaacattaatgtgaagta

SEQ ID NO: 453 - DNA, 523 bp, Rattus norvegicus
  Genbank Accession No. AI102711
acaaagaagcaactttattactcgttcttattactcattcccagtcaggttctcttcttgctcttgccagtgactttggccggcgtgagggctggagctgtagcctggtacagagtggaggatatcttgttgatgtagtacagaccaaccatggagaagatgaagcaagtggtgacacagactcggtggatgaggccagatgcgaagagtgccaacagcaagcagaggagaatctcagggaagatttttgcttggaagcctttaccaaagaccagattctccagattattgaaggcagttagggagaagacgaaaaggccggagcccagcaggcccccctgaatggtgagccactcggtggaggccaactggcggctgtatatctgcatgccagcgaagagcagcagggacaggagggaggacagcgccaaggaggtcccggtaccgactaccatcacgccccgtccgtgggtccaatccgtgcctctggagaaagaggggagccaaagccggccctcgtgcc

SEQ ID NO: 454 - DNA, 431 bp, Rattus norvegicus
  Genbank Accession No. AI234251
ctttagttttgcttttaatgaagaaaagatcacgacatggaagagggccaataaataaagtaatagtagactaactaattaattaaacaaacaaacaaaccagctgtaaaagaacatcaccaaagcaaggattgcaggcccatcacccgtgagtatggagtagagttcattcctggtggaaacccttcacgggcctcccagcttcgatcagcaggcagcaggtaggggtgctgctgggggcacgtcctgatttttctgtgtctgtgtcattttcgatcaactgtgtcatggggcttcctgtttcagctcccagttattcagggagaagctgatagacggtctgccttcccagccactgtgctgtgaagatcccaagatatgctcagcttgcctggaaagtcactttgaaacttagaaagcagccactgtaa

SEQ ID NO: 455 - DNA, 611 bp, Rattus norvegicus
  Genbank Accession No. AA944442
gaatcagccttcattgtgcaagtatgtcaccacttttgggtctgagacggccagggcaatgtgctcctgggaaatgggacccaagctgggtgggcagctgggaagctttctatgaggtcttctgagtggcaaaggcaatgggggtcccagccctctagctgggtttgctgacacagtgtaagcacaagctacctactgtggttgaataactgaagggtactcccctgaagcctctgtctgcgtggtgctggccctggggctgggtcagcttctcagccaagccccagggtcacactgggcctgagagtctcctgggagagtagagaggagaggtatcgggctgggatcagcgggccaagcaagtggcaaatcatcctgccccagtttgtcccagtccctggaggttgtgggtctggaaggaaatgcttgtgacgtgggccaggcctcagcacagaagagaggactacatagcccgaagtggactggaaacagaatgcccccggaggaggggctgcattggagcagaagtgggaggtggctagcaggacttggggcagagggtggtagggatcattcttgaacatgaggggctgctcatcaatggcgaagtg

SEQ ID NO: 456 - DNA, 428 bp, Rattus norvegicus
  Genbank Accession No. AI105383
ggaaaagtctctttatttgaatttggttctcaggacagggctccaagagcaactgtatgcaactggcccagccagtgggactctgaccccagtctcattctaactagagggtaaagtctttccaaaacatagccccaccttccagctttctctacaggggtccccaccacctccatatgagctttagaaataacctcccataccaggagatggatgagagggagggtcccatctcagtgtagacatagtagacaaaggcacagagtcatattggttcttctggaggtggcctccgctgggagtcccggccggacggggagtcactgctaccagagaccatccaaaggtagtttgggtgcacttggccctgcacagcttcacacaccatcagctccccgtccacagaaaacactcccctctggttcctg

SEQ ID NO: 457 - DNA, 572 bp, Rattus norvegicus
  Genbank Accession No. AA946036
gtaaaaacattggtcactatttaacatacagaggcaacaaaatgcacctggtttacatgcatcaacaagtcaatgaatcataatacacaaacaacatggattctgaacaaacagtactacagcagctatgtatgacacagttcgaggcagctctaatgccgacagagaacagctgctctgagaaccagggcagtccactttcagctgacgtcagagtctccgtgtcgagaatcgctcaacacgggtggtatggagtcattaacataagggggccaccttcagaaatcacactgtgcacagcaccaggttaggtcagagccagagctcgagaaacgatgcctttggtcaaagacagagagactttaattttttgtttgtctgcttttgaaaactaagtatggtaatgattcaaagcattttattgattaaacatgattcaaaaaatttcactgaaaattagaatgcctttcatgtgaaagttacatcttccattatttaagtcttcaatgacactggcataattctgttaacagaaattccggtaataaggactagaagatttttaagagaaa

SEQ ID NO: 458 - DNA, 632 bp, Rattus norvegicus
  Genbank Accession No. AI013396
taaccgtccactaaagggaataagcttgcggccgcatgtgttttttttttttttttttttttgaaaaggaacactttattaaatacggtgtcatttagctacatttacatttatctgtataaaattaactcttctgtggttaaaaaaataacttcaaaccacttggcctctgctgggcagacagcccttgaaactggctgactctgagtcatacttggggactggcagaactgagcttgcaaatccctggtgttaggtgcagtgttggctggataaggggctagcttggtctgtcactgctgctttcaacaactcagtgtaggtgcttcaggactacaagttgaaggagaggtcttcccctctagcagctatacttgtgtcagagatggagggtaaagggcagccttttccccacccatctgttccatagatatgtgagtagtagtccatcagaaccctaaccactgaggtatcctctcctgagccaagctccccacagggccttggctcaccctgtactgcagtctatatcaaccaacaccttttctggggtctgatgagcgtcggcatcgggcgccttaacccggcgttcggttcatcccgcagcgccagttctgcttacccctcgtgcc

SEQ ID NO: 459 - DNA, 590 bp, Rattus norvegicus
  Genbank Accession No. AI013558
tgtgatttttttttttttttttttgtaagaattgaagtctttatttgtgatatccataaacgttgctattctatgtttctattcaggaaggcaattttctcctattatcagtgtttgttttttttttataaacaacaacttgaattctattgcatgaagggctacaaatacacgttaaccaagcagaatacagatatttgtttttacaacttgcacctaaaaccccagtacacacagctgcttcagtagctatcagagcagtttggggctactgcccaagctatgcatagcagtttacatattcaaatctcacgtagaaaagcgactgatcacgggctgttaactacactcctgggaagcccgtctcagctacaagtaaatgcggacctttcaagtctgcagacttctggtggcaaactgctaaatctgatgaaattggtttttttaaaccaactttcttgcagctatactgccactctaccagcagatggtgctacatcggttggacttaaaaggacaaagttcagacttagggaagaaacggttttttttaaacctgctctgaaaatacatcttaaaaaaaactcatt

SEQ ID NO: 460 - DNA, 368 bp, Rattus norvegicus
  Genbank Accession No. AI237273
acaagaggcactttattaactggctggaatgcaattacgtaagcacagggcagggcatacaagagaagggtggggcgcgatggcacacaggcaggcataggaaagcctgggcctcctggctgggagccatcagtcaaaggtactctgtaggatctaagtacagaagcctgttttccagagccactcccaacccccaccaccgctctcgttccttgcacagggccctcctcccggatggatgtttatctggaaaactcctccagttctgggtacacactccttcctgtgaccccagccaccccaagctggaagtggggttacatgtgaaggcactcttggtgactccactcatctttggagcctggtgg

SEQ ID NO: 461 - DNA, 2261 bp, Rattus norvegicus
  Genbank Accession No. AF012714
tcggtgcttagcccctacttcggcacgaagacacgctacgaagatgtcaacccctggctgctgggcgacccggtggcgccgcgacgggacccggagctgctggcggggacttgcaccccggtgcagctggtcgccctcatccgtcacggcacccgctaccctacgaccaagcagatccgcaagctgaggcagctgcaggggctgctgcagacccgcgagtccgtggatggcgggagccgagtggccgccgctctggaccaatggccgctgtggtacgatgactggatggacgggcagctggtggaaaaggggcggcaggacatgcgacagctggccctgcgtctggccgccctcttccctgacctcttctgccgggagaactacggccgcctgcggctgatcaccagctccaagcaccgctgtgtggacagcagcgccgccttcctccaagggttgtggcaacattaccacccaggattgccacctcccgacgtctcagacatggagtgtgaccctccgagagttaatgataagctaatgaggttcttcgatcactgtgagaagtttttaaccgaagtcgaaagaaacgccacggctctttatcatgtggaagccttcaaaaccgggccagaaatgcagacagttttaaagaaagttgcagccactttgcaagtgccagtgaacaatttaaatgcagacttaattcaggtagcctttttcacctgttcgtttgacctggcaattcaaggtgtccattctccctggtgcgatgtgtttgacgtagatgatgcgaaggttctggaatacttaaatgatctgaaacagtactggaaacgaagttatggctatgccattaacagccggtccagctgcaacctgtttcaggacatttttctacacctggacaaagcagttgagcagaagcaaaggtctcagccggtctcttcttcagtcatcctccagtttggtcatgcggagaccctcctacccctgctctcgctcatgggctacttcaaggacaaggagcccctgacagcatacaattttgaggagcaggtgcatcgcgagttccgaagtggtcacatcgtaccatatgcttcaaacctaatatttgtgctttaccattgtgaagacgcacagacccctcaagaaaaattccagatacaaatgctgctgaatgaaaaggtgttacccttagctcactcgcagaaaactgttgccttgtatgaggatctgaagaaccactaccaggacattcttcagagctgtcaaactagtaaagaatgtaacctacccaaggtgaacatcacgtccgacgagctctgaggactcatcagtgctctgctgagggcgcttgttgccaataggtagccactctaaaggcagcaacaggaggatctctgtgagctcaaggccaacctgttctacatagtgagttccaggccagccaaggctgcgtagagaaataaagtttggtccttttgtcttttcacagaaaatgatagtttcttttagaatctggacatacgggtaagacatgactctccctggagcagctctcttcagaaaaactaattcagcaaaacagctgtccctcccagtgtttgcagagctgaaattttcctaatgacctaagaaaatgctgatgtagaatggtattagaaaataacacttcaaaagtgttggataccaaagcacagtggcagctgggtgagccgcagtgagtgactgagatggggacttgagtgatcatgttgggttctttccttctccttcacgaaggacacaaagaaggaagtctaataacgtatccatccagacaggaaatcaactcgatattaagaaccaggctgaagtaaaactgaaagtgtgggctatttttgttgatgttatttacaaaaagatttaaacactgtcagtaattgcctttaacctccaagtaggtcttgcagaaccacctccatccctcggacctgtttgaggcgcgcagttataatggggcccagcctggtacagagccgacttccttgactgttgcctggttatctttcgttccatcatggctcccctttttatatcttgatattacataaagtttatcttttggtggcttggatttttttttaaataaagacttatctgcctaatttaattgtagagattcgaacctgattcaaagaaattttgagttctttcaaataccataaaaatgtttgctacaataaataaataaaattcttgtggctttactaccaaaaaaa

SEQ ID NO: 462 - DNA, 442 bp, Rattus norvegicus
  Genbank Accession No. AI235277
gacagtggtggtgagagatttgattgagatgccttatggagtagtcgcattctgaataaagcaccacactgtgtcagtccgttcccacactgctgctaacacagctggtttgcttagggagtgcccaacttagccagatcaagggaaccccaagagagcaggggcaaatcctgcctctggtgccaagcctcagggcaggcaatcctggagaacactgccagccttgggaagcttgggagacctctaggctgttttcccttcttttcaaatcccacaatttcctgacggggagaagctgtaattagcccagaccaggcaacagatctcagctagaggtacagctgcagggaaaaccccatggaatcttgggaaccagtgtttttccaattacaaggaccgaggaataaactttttctgtgggttctattgaaaccctcgtgcc

SEQ ID NO: 463 - DNA, 534 bp, Rattus norvegicus
  Genbank Accession No. AI236168
ggtaacaaaatactttattggtaccacttaatgtaaaaaatatagtaatgctttcaaatcttagctcccatcttcaaataaaagctagttttaaaaaaataggagttaaagtaaaaatcatttgattatctcaaaaccaagctgaaaccacctttataaatcactaagtaccctaactttaaataccatggtcactgctctttacaataaataagtgtgtacaaaggagacattggctctgcttattctgcagagagcactttatacatcttaaaacacctcgcactcccggagccctcagcagttagctaccattggagtggactcaccttagcacctagagatttggcatttgtcacgtctgaggtggctgatttactgaaccaaacagtgactttccgagttcgcatgggctatatacaaatagccctgtaagagtcaagggctatgaaagcaagcccgccctcgccgtagtgccagttcctgatcaagtgatggccggatgataaaatatccatgtgtgataaatattat

SEQ ID NO: 464 - DNA, 462 bp, Rattus norvegicus
  Genbank Accession No. AA866383
tttttttttttttttttaaaaatagtttatttatttttaaaaccattaaggcaaaactgtaccctgaaattaactctttacattcctcagcttacagtaggatgttccaaacatacaggttcccataaattcaggatataaatcaatgcatacagtcagttcggtctcctacggagaaaacgaagactcgattttttttttttaaattaagattaagttatagccattttctaattgcccggaaccaatcagctcatgtgactagaaaattctatttgcccttctgtgttcaccctgattcctgatgtcctggcgagccctgtatccacaacaagctgggggttggggtgtgtgtgtgaggatgctggtaccggctcgacaagtcttattcaggcctgttagtatcacaggggtgaagggctgcaagctcccaggtctgataggatggcaccaaggacatta

SEQ ID NO: 465 - DNA, 404 bp, Rattus norvegicus
  Genbank Accession No. AI639350
ttaaacacaaaaccaaaaagtgtttacttggaaataagcggacaaatttccactagaatactgacacggtcctcccctcagcaggaggctgggagtctactaaattgcacaaagtccctgattagcttctttctctttggcataagtcagcgagcgccaagagccagctcccgacaagcctgagctgtgaagtatggagcccttaggaagggtcagcttagcaggacacccaggtgacggtctgagtgggaagcagtctgctccagctaagccctgtgtccaccagcacattgagcaacacttgtttctttgataaggctccaaatgataaggctcctgtcacctggcagagccatacctggggctaggtgacctctgtctggaggaggaaagtggccatgatg

SEQ ID NO: 466 - DNA, 605 bp, Rattus norvegicus
  Genbank Accession No. AI007884
accaagaatagcttttattaagacctccattagaaaacgtcagacttttaacaatactccggaatagaagatgaggaaggggaataaccatgaactcagcagcgtgtagtgcacggatttggctcattaaacccgtcattcctagaattcatagcaaaagacggcgattgctacgagtggtgggtgaaacaggagtgctgtgtttctggatactgtgcacgtcacaatacttagatgtcctgggtgacctctgaagagaagcatcaaccagtgattccaactgtacaagagacgcgcacttggaaaccttgtgactgtgagaaacatatttatacctgtcttagtgggatccagagaaacaacacgttatatataattaaaatggagaaataatagtttctcctggtgtaaaggtacatttggaatttcaaaataaataatagttctaagggaaagttgttctatttttcaaaataagataaggctgaaaagtccttatgatggatttcacatttgctttcacttttactgttaggtacagctacgaaaccaagccacacgggctcggggctgtctgcccagttaggggagccacccagacagca

SEQ ID NO: 467 - DNA, 550 bp, Rattus norvegicus
  Genbank Accession No. AI177734
aaataaaaacaagaacttcatttatttgcaatttccagaaggtaatatacataaagattcaatttcatatacaactgagtgtatatatgtatataccacacacacaaaatgagtatgtactgaattttcagaaacaaaagttaaaataataaatagaacaataaaactttggaaaaaataacacattttagttgtggaaaatatgattcttaattatatacagttacatatataataaaaagccacctcttttcagattgcacaaaacttgggaccagtaaaagcatattttacagcatgtggtgctatgatcccaggtccttatgattaactccaggctaaaaaacacttacattcataatacagtaaagatatgcagtactgtttgaggaagaccgccttctcagcttacgttaaccctacaaaggctgtacaggaaatttcacaaaaagaaatctcaaataattattgtgcccacttcatgctgaatcaacagccaaaaatgggcttcaaagtaaacatggttgtcactggatatttttaacacctt

SEQ ID NO: 468 - DNA, 491 bp, Rattus norvegicus
  Genbank Accession No. AA997706
tttttttttttttttttcccagccaacaccagatacgtttattgtacattttcaaggttattgtctacaatttttttgaaaatcctttgaggaaaaccagcagaagcattacgaggtcaagctccccactcctctgtggcctgctctcctcctgcaaagcccaactgctcttctcacccaggccaacccagggctttgcttgtgggacttactacgaggctcactgatctttccatccagaagggggtggtgggtggaacgtgatggatgccgggctaggcacggctgtaagggcaagggagacccggatcatttcagagccccacaggaacactagcacagtagcgaagcctgaagcctccacacacagtaggcgaacatcattcgctgaatgatgggaacagacaggactttccaactcatctgcgggcaagctgacaaacccatcacacagagccatcctgcctgcaggcactgtcctcaggaacaaa

SEQ ID NO: 469 - DNA, 1798 bp, Rattus norvegicus
  Genbank Accession No. X63369
cgaaccgactgtcggtctcttctccatggccattcgcgccaccatggatctctctgccatctacgagagccttatgtcgatgagccatgacctgtcacccgaccacggaggaactgagtcctccggaggactttggaacataaactcatcggactccatcccatctggggtcacctctcgcctgactggccgctccactagcctggtggagggccgaagctgcagctgggtacccccaccccctggtttcgcacccttggctccccgcccgggccctgagctgtcaccctcacctacttcgcctactgcaactcccaccacctcctctcgatacaagactgagctctgtcggacctactcagagagcgggcgttgtcgctatggggccaagtgccagtttgcccacggcccgggtgaactgcgccaagccaatcgccaccccaagtacaaaacggaactctgccacaagttctacctccagggccgctgcccctacggctctcgatgccacttcatccacaaccctaccgaggacctggctctccctggccagccccatgtgctccgacaaagcatcagcttctcaggcttgccttcaggccgcagaacctcaccaccacctccaggcttctctggcccttccctgtcctcttgctccttttcgccttccagctccccaccaccgcctggggaccttccactttccccttctgccttctctgctgcccctgggacccctgtgtctcgaagagaccctaccccagcctgttgtccctcctgccgaaggtctactacccctagcaccatctgggggcccttgggtggtctggctcggagcccatctgcacactctctgggatccgaccctgatgattacgccagcagcggcagcagcctgggtgggtcagactcgcctgtctttgaggccggggtgtttgggcctcctcagccccctgcacccccaaggcgtcttcccatcttcaatcgcatctctgtctctgagtgacaagtgcctgcccagtgtggatcagctagatctcaaagaagagggagggaactgctcgttgctgtggggacctggggggactcctctaagtccctcctcctggacattccaagttgcattaacccattcccctggtgctgggctagggcaggtccctagtttgcaaattcagtgtttgggtggatccgttcctagggtacctgagatgtagcatgtttgaggggtacagttgacagttgatcttccaggtctcaagtcttatgttgtttctgagataggggattattacggtaccccaggctggctttgaactcaatataatcctgccttagccttttccaagttctggggttacaggtatgcaccagcccctcggaaactctggtctcctggaatcttaagtgctgtgaagagccggctcccacaatactatcctaatttttactagaccccgaagttcagtgtccggtggttgtagcctctcctgagaatcctggtgctcaaatttccctcccaaagcaaatagccaaagccattgccaaatcccttttcccccacgcccctgccccaaccaatggacccttttatttatgacgactttatttattgtaataagattttatagtatttatatatattgggtcgtctactccgtttttctttttgtaatgttaaaactgatactgtattaagtatatactataatatattaagtaatatattgttaccgtacaagtctatttttgtgggtttttttggaatttttaaataaaatcttgagtgtgaaaaaaa

SEQ ID NO: 470 - DNA, 536 bp, Rattus norvegicus
  Genbank Accession No. AA859954
tttttttttttttttttggaatgatcaaagatgtctttataaagtttttcacgacttcattctaaatatacagaataaaaaatggcgtactcatttgtgagacaccaaccagattttccttatactgtctcaaaatttaaagatcaatttccccagagggtgtgcaatgcatcataaaatggcctttttgagggtgggaaaggaaggcatattacattgttccatgataggcatgcaagactgctatccaacatatataacttatatacatttggtgacttagaaaaaccaatcatttgtgacaagcctgaaaagcctggcatatttaacatacgtcagaaggttctgtgtggccgaggttctccagttggaccatgtggccctgtgaaagtgtcagaaggccaattttgttaagtttgcagcagaacatcatatccaccctaaagaatacaatgtggattgaatcgaaggtggagaccttaccttaacaaagaaagcaaaagtatgtcagtgtaaaatgtggactaaactgcttt

SEQ ID NO: 471 - DNA, 507 bp, Rattus norvegicus
  Genbank Accession No. AI010303
  misc_feature (1)..(507): n = a or c or g or t
ccagattcataaggttttattgtcaccacaggatcaggattcatcttcaccaaaaccctgcactaggtgcttaagagcggctgtgacctatagcaagaggaagcaggcacaaatgaaccgaggtcgattgccctgagagacaggcagggccggctgccccctcctgcctgcccacagcagacacttctagaccatcaggcagtggggtttcctggcccctagggactagctcacatggtgtctcactaagtgtcagggaaccctggccattccaccttcccaaggtcattcacataatacagaagtgcttgtccagaagggagctgcctggtctcgtaaggagtatgtaagaaatgaaagaatattttgccaaagggcctatccacacatggagcactcagcaagaatagggcagccaggctggcaggtgtccagtcaccccaattgatgtgacttgaagcaaagggtacacacaggcctattatcagcgatntgacaaagcaatct

SEQ ID NO: 472 - DNA, 481 bp, Rattus norvegicus
  Genbank Accession No. AI104744
  misc_feature (1)..(481): n = a or c or g or t
gttctcaaaaggaataaagtcccttgtgcccaaacaaatcacaaaaggatacaagatggtttactaggaccacctataaaccccgaatgccatccagtcagacaagttggagggcacttctttgtataaacaggttcttggagaactctacatggtttttggaacaaatcctggcatgggcatagctcaccctgcagcagagtacacacaaagcagcttctaatgacacaccatcagtaaaagtagttaatttttgtattgcttactgaagaagtttctagtaaaagtggcaccagaggatctgtggccttgacgtgtacaaactcagtaagaagctctaacaagtagcatggggtatggcttggtaaagtcatcagcagtgtgagcacatgcctcattgnacttctcatctctaatggagctcaggcagcttgcttctgggagggcattctagagatgctctgtgctctgcattcagtaa

SEQ ID NO: 473 - DNA, 620 bp, Rattus norvegicus
  Genbank Accession No. AI232319
cacagggcacacactttattgtacacagccgaaggggaggatgtgtggaaaccctcacaccagcaccccttcctacggacttgcttttcttcgcccttccctgtgactgagttttagcctactggattactaattcacaaggcacagaagcgaaggccagttggtgtctggacgggaaatttagaagaccaagggcactgtttcctacctccgaggtgttttccccaggacacagggtttcttggtcctcagtgtagggtgagccacttctccaaacagataacaccatcatttaaaattcaaaatgtaaatgcaacttgcgtctgggtggactcgctctacacatctctaaacacccagctgggcacagggctgaggaacagggtgtgcgttccatgtccagtggtgtggaacacttcctctgttggtatcaatgttttatatgagaaacaacccacaaaactaatcaaacaaaagcttcacctttgcacggagctcagcatgggtgtctgtgcaagaccaatcacaagcccacgtgttaggaattccctgtgctgctaaagtaggattaataatcaaaggtatcgcggggtctagtagtaaccggtatgcaggaagca

SEQ ID NO: 474 - DNA, 590 bp, Rattus norvegicus
  Genbank Accession No. AI177125
gcatcaatcgacctttaatgtccaaaagaggcgtggatgcagagcatagatgtggcagggtctcagtccctgcacagaaatgagagatgaacaaaaacgagacacttccacctggccagagtctgggagggcagggaggaacacagacctggacattcgtaagaaaaataaaacctaaatcaaacattcaatcttgtacccaataaaggtttgaacagggaactcagtcaccaccagttcccaccctcccctgccagcactgaagaaaaacaaaagttcaacacacactaagggcttaggaggaaggggcattctcctgccttcccccaacccccaagaatgggctggggaaaaaacggctatatttccccaccccttacagtgtcaaccctacacgagttctgaatgtgatccgtaagaatcagcagctcaattggcaaggacaacccccacccaccccaatcacttcaccaacagacaagatttcccttgcacttctctccggaatctcctcattcccagcccttttccacctcctcactcccagaggtcattacacacttcagacctgttccaaggagcccctcccc

SEQ ID NO: 475 - DNA, 369 bp, Rattus norvegicus
  Genbank Accession No. AA996993
tttttctttttttttttgcaggtttaactgattttaattgaacatgttggacacatggtgttgcacatgccattaatcttaacaattggaacacagatcctaaacagctacacactaagcatttataaacattcacaaacaaaaacagtttgcaactttttgaggaattgtagacacaagcaactaataacagccatgtggtcagctggaacttgagattagcactttggacctttcacttcaagcccgtcagcttccatcttcttcctcgtctcgaagatcgcacttattttcttccactgtcgatcaagctctgccttagcagtgggttcattgaagcgcctggttttccgtccccgtggtcagcaa

SEQ ID NO: 476 - DNA, 461 bp, Rattus norvegicus
  Genbank Accession No. AI228291
acagagctttaaaaatatatatttattgagtgtctagcacaataaaagccacggtaccaggcaggagcaagctggagataggaggtgaccagggcacacagctcctgccctccatgagtgagcatccccagtgagggataaaaaggaagtatccaatactgagtcaaatgcatacgatgttattggttgagcgacagcactaggaccaactgactaaaccagaactgaaggaccgggaccgggctcagggggtaaccagcagactcccacattactccgagaactagcctaggatctaccaagaaaggactgggagcagggttccgtggtggcacttagcttatacaaggccctgggttccgtccacaacaccacaaggaaaacaaacaagcaagctacttgttggatttgaattcactgttaatgttgtcttttcacacaaatgaattatagatagattg

SEQ ID NO: 477 - DNA, 548 bp, Rattus norvegicus
  Genbank Accession No. AI227724
cacctcctgacaagacaaggtactttatctatggatatatacacattttttttttttcttcgcaggaaacggcactgtctgagagatcttcgacctcacacctttctcagccttaattttaaaacctgacctgacaggacacaaagttgtgtaactaacatacaaaatacagcatcactgggagctgctggcaaaaaatggatgtggaaccccgagaaagaacagactgcaggtttaatctctatagaaagctacatgaaaactgagtacagcctaggcagccgacggtccaggtcctcacatattccccatggggatacatgcctgctgtctgagcctctagaatcctagcagttaaatgtccaactcatccctcccaagggatatttatcctgaatgatgtgacgatccaaggcctaaccagggctcttctccctggctgaccctaacccttcttgcaagggtggctgtgagccaaacttcttccccaggcagggtctctttccttcctcatgaacacatgcatcatctaggagtgaggatgggac

SEQ ID NO: 478 - DNA, 510 bp, Rattus norvegicus
  Genbank Accession No. AA963780
  misc_feature (1)..(510): n = a or c or g or t
tttttttttttttttttgatataaatgatcccttttattgttaagtaatgcactggcctggctttgcactgcaagccctcagtcacgatatagtcaataactatgcctgcaggttcttctgcacaatccacaattcagacgcacacagagctgggtgagtgggaggggcaggagggtggcgggcggcatgcacctgacccaggcctggcccttccatatggggttggcaaaggcagataaaccccatggaatgaagaacaaatggtggcacagaatctttgcacagcaagccaagggctgctaggaaactgtccttcataacctttgggtccaggccatcctggaggcccacaattctcttttaaatttgttaataagagaaaataaattaatagctttggtcctgaggatgctgaaccagcatgtccacagtttttggcacaanaaaaaagggtcttttttttttcctttggagtgcaggatttgttgacttacttttaagttcacttt

SEQ ID NO: 479 - DNA, 590 bp, Rattus norvegicus
  Genbank Accession No. AI009756
aaattataagatttacaatgccttgattatgcaaaatatcataatagaaattaaactaaatcaataaaccaagagaaagaaaactttttccttaaatatcagtatttaagccatccttgtcccaacctcatcttataaagtatgctaatttcaaaggtttcacttgcaggtttaattgtcattttcagcgttttatggaactgtaattttttccattgctatcatagctagcgtttatgctgcaacagcagcagaatctcacaagtgcgatcaaatgtggaggtggggcccagccttcggttttatccacagacagaaatcatccacaggcatcaggagagcgagatattctcgagtggccagagtgtggcttagagcgtggtggcagccgctgtcctgtcgctctgatctgaaccagcagcgcgtggtggcattactgctgtggatagtatgactgctgcgggggctgagggaaggggtaggtaggctgctggggtcctgggtacggagcctgtccagggctctggtgatacaccggtgggtacggcatattgtactggccatatgtgtaggggttgtagcccatgggc

SEQ ID NO: 480 - DNA, 507 bp, Rattus norvegicus
  Genbank Accession No. AA849518
ggatttcacatttgctttcacttttattgttaggtacagctacgaaaccaagccacacgggctcggggctgtctgcccagttaggggagccacccagacagcaaggtccaggacggctcgctctcagatgtcttgctcgatcccagtctcgggtacgccttcccttctgcctcttcctggcccccacccttttcacttcgaggttttaccatcaagacacagtctggtaaggtctcaaagtgacccatcacaaaaccaaggcagctttaggctgtgaaagcatcggacctttggcaagggttgtcctccactctcgcctgctcactcgctgtcaggggcttctttacagatctgtcttttcttcgtaacgacaccaacacgcagcccgctggctgtccaggtatggcttgcagcctaaatggatgacgctgtcaaagaggagctccacggttgtctcgcatgcctggacgttctgagagagtccgagtgtcttctgcacgtctctgc

SEQ ID NO: 481 - DNA, 552 bp, Rattus norvegicus
  Genbank Accession No. AI178527
aaagcattagtatctttattatggcataatgcagtactttatacagtaattcattttaatgtaaaaacattttatgtacaatttcagagaaacaactatatagacagctggaacataaaaacaggtaattcaaaagtccagagttacttgataaactggaaaatattttctctgtagaaaatagtaaaaatgataacatttcccactaagcccatttaagccaaataagagctgaattatacataaatattggatagattgtgtgacccaaaagaaacttctcttgctttatttgaaaagccatattttatttaaattgtgtcaattgaaattctttccttctttcccttcactgtttggttttccgcagatcattttttctatagggtaacccattaattcaaaattcaaaaggttttagttttaggctgtcctcttggaagtagagccagcatgtccttctaccatcttgaaatggcgaattcttacccaatagtgaaatgtttcattaaatcatgcccatatttattacaagccagagagtcgtcaaca

SEQ ID NO: 482 - DNA, 513 bp, Rattus norvegicus
  Genbank Accession No. AI178688
  misc_feature (1)..(513): n = a or c or g or t
gcctgaggacggccatttatttccaagacatagactgtacttttacgacagggctttcagaagcagggatcttagttatagcctagagaggtgtcaagaacacagtggaggagccatgcagacgtgggggctttatccaacactgttacaacactttttaaaatgagcaaaacatctttaaaaatccttataaattctttatatgttacacattagagacaatatttacagtgaaagggaggggagagactttacagcaaatctttgcataaaccagaaagatggacagacctgggcagtagggcaggtcaccccactggggctcccctggaatgagtgagggcagaggggcgactagtgctttaggtttatttacactgtggggaaagaggagctgggtcccacccaccctgctggaacagcctggctaagaccctatccatcagtgccggacagacttcttcccgattgaaagtgagagccggcatgctaaactggcaagaagcanggtga

SEQ ID NO: 483 - DNA, 506 bp, Rattus norvegicus
  Genbank Accession No. AI009012
caagagaaaagatatttaattatttctcagtctaattactcttaaagcgttcaaagtgttttcacaagtgcaaggggagggattgttctcagccaacatttaccagtgattccgacacacgcaaagaaactgccaatcacggtgctttatacttactttaatttctgcactgaaaaagaaaaaaaaggtaaaaacatgacaaattacagcaacatcatcttgtccttaatcttgctcttggggccagagttgggaagagacagggaaacattgaagcgtggtaatcacatgaccaggacacctcagtctggctaaccagggctcgctccactgctgttttagtgctcgctttatttcttgtgtgcaaactgttactgtctaaagctctcaaaaggacgcgtacagacatggacaccctgaagagaggagggtactcgcaggccctccccactcccagggcaggcaggaaggggagcgttacagaaatagttaaaagaagggtgctc

SEQ ID NO: 484 - DNA, 522 bp, Rattus norvegicus
  Genbank Accession No. AA858548
cggccgaaattgttttatttttttggttttttttttgaccactcagacacggatttaataattgtagaaatccaaagaataagcatcaaatctcgaagtcagagtgaactcttgcctgcgggttggcttgactacgcccagccactgagctgcctcaaccagccagggatctatgaggctgacttctgttttcatgatgtcaccatatgtagtatgtattttgtctcaataaagcatttgtaccgatggctctggagcttggaggaagactaaaggaatgtgtagtgattctgagtaaggtgtggacctacacggcagaactatctgggggagggaaaaacaaaggcctttcttcccgtgtcaggacagtcttgagtggctgaactaagcacatgggccactggggctacactgtctgaactccgacaggtcctgctcctctagggagagcttgcagttgggagttttagcagataagcaccgaaacaggtttccgattccttcctgcagctgttgtgcctc

SEQ ID NO: 485 - DNA, 339 bp, Rattus norvegicus
  Genbank Accession No. AA955126
tttttttttttttttttgcatagggagaacggtattttattgtggagacagtgtaccaacaaacgagggaaggagagaagggaagggttttgacaggtgtgctcttcggggtaaggctattacaggagtccaggaaggacaagctggcactgttctctgtgacaggcgacagggccacgcgccgtttcttctgtcgcttgagcactgagggcggtgtgccaatgcctgagcccccaaactcagtgcttggggaaatggggatcagctctccccggctgctccggctcaagtctgaaatagtgtggccatcaaggcgatactcagtcacactgggccctg

SEQ ID NO: 486 - DNA, 583 bp, Rattus norvegicus
  Genbank Accession No. AI013790
aaaacaattgctttattaaaaatagcaaatctcacgagtacttattaaacatttgtcactggccattgggaaacacacctgcgtgtgtactgattgtctgacgtaaactgaagctggaccgctacaggacacctgtgcaccaccaccgtgtgaccggcactgggtcagtgcggccatggcaaggacgaatccttcagcccgacaacgtttagcacgatgcatttcaagtataacccttaaggcaacaaaagaaagcatagcagcacaactctgtgtcccacttcccgaggagacctacaggcgggccacggcctccctggcggtggagtacagcgagcacatggactggaagcggcgtgtggacatgatcactgcacttgcattctcgtgactcgagagtctgttgcgggagatgattctgccacaggactgggctggaagtaatgactgctgcttccctgcaagtctcagagcaggctgcaggctgcgggccgcattagctgctgggtgcactgggaacgtcctgcgcatcggccaaatgcagtttctgtatagaagaattcaattcttctaagtcagacag

SEQ ID NO: 487 - DNA, 508 bp, Rattus norvegicus
  Genbank Accession No. AI235483
cgttacaaaaacaactttatttatttttgttcctgtacactacatagcgaagtaacattaagacggtttcctttcatgaacatgtattctgacaaaccaaccatcagtcctttctctcggcagtccaagaagtttgccagccctcgaccatctgaatgcacatgaacatagcaaacagacgcgaaccgaacacgagcaagcacgtaaggcgtggggcgtcaaccccaaagagctatggtgtgattgcaggaaaagttcttatagcccgtcatgtcctggatgtccacattgcagtccacggtgaactggactttggaaaccagagcactgttgtaggcgatgatgatcaggaacttgatgaccttaagcacagtctgccgcacatacatggcatacaggatgtcaccttcctccacgtgcagtctgaacttcttaaccttctcgaacaaggccttggcctgttcaccttccttcttgtccagagcccccgcagtggttttgtcaacca

SEQ ID NO: 488 - DNA, 543 bp, Rattus norvegicus
  Genbank Accession No. AI639504
ttagagagcatcagccgttctatttcttgcatgatcattggcatgaaggaaaagtccaaaacaggggctttgcattctggggattgcgggccaagtgttataagctcctcatagcactttgcctgggttcatgagacctcggggatccagtgtgtctttgagttgcctcatggtctccacacccacaggacccacttcctcttgaagcagctgcctcttgcccagaccgatgccatgttctccagtacatgtcccatggagtgccagggcacgcctgcccagattttctgcaaaggccttgaccctcctctgctcctccacatcatctgggttgaccaacaggatgcagtgaaagttgccgtcacccacatgcccaacaatgactcctgtgagttttgaggccttaagctcctccttggtctctaccaagatctctggcaaccgggagatgggcacacacacgtccgtggaataggccttacttcctggacgcagggccaaagctgcataccaagcattgtgccgtgcagcccaaagttcatt

SEQ ID NO: 489 - DNA, 353 bp, Rattus norvegicus
  Genbank Accession No. AA859085
tttttttttttttttatcaaatactctttaattttattaactcttggaaaatattccaaggaaataattgaaaatacagaaatattttgttagtacaaagacattacctcaactgtcctcttagtgaaaactgaatatggtctgcgtgatctattagggcaatagtaaaaataaatgtctgtgttacataagagctttgcataaaaatccctgtattgtgtgtaatgtatgatatcgtgtacgcgatgtgtgatataaaagttagcaaaatgaaaaataaaacagcctttgtggattaggcagaaaaatatcaaacccgatgccttttccttatttcagtgacacgtgggaag

SEQ ID NO: 490 - DNA, 1877 bp, Rattus norvegicus
  Genbank Accession No. M38566
ggtctctggctctaaactcttggcttctcagacacgatctatggctgtgttgagccgcatgagactgagatgggcgcttctggacactcgtgtgatgggccatggcctctgcccacaaggggccagagccaaggccgcgatccctgcagccctccgggatcacgagagcacggagggtccaggaacaggtcaagaccgaccgcgcctgcggagtctggcggagcttccgggacccggaacgctacgctttttattccagctatttctacgaggctatgtgctgcacttgcacgagctccaggcgctgaacaaggccaagtacggcccaatgtggacaaccacctttgggactcgcaccaatgtgaatctggctagcgccccgctcttggagcaagtgatgagacaggagggcaagtaccccataagagacagcatggagcagtggaaggagcaccgagaccacaaaggcctctcctatgggatcttcatcacacaaggacagcagtggtaccatctgcgtcatagtttgaatcagcggatgctgaagcctgctgaggcagccctctacacagatgccttaaacgaggtcatcagtgactttattgcccggctggaccaggtgcggacagagagtgcatcaggggatcaggtgccagatgtggcacatcttctctaccaccttgccttggaagccatctgctatatcctgtttgagaaaagggttggctgcctggagccctccatccctgaggacaccgccaccttcatcagatctgttggactcatgttcaagaactcagtctatgtcactttccttcccaagtggtctcggcctctgctgcccttttggaagcgatacatgaataactgggataacattttctccttcggggagaagatgattcatcaaaaagtccaggagatagaagcccagctacaggcggctgggccagatggggtccaggtatctggctacctgcacttcctgctgactaaggaattgctcagtcctcaagagactgtcggcacctttcctgagctgatcttggctggggtagacacgacatccaatacactgacctgggccctgtatcacctttcaaagaacccagagatccaggaagccttgcacaaggaagtgactggtgtggtacccttcgggaaggtgccccagaacaaggactttgcccacatgcccctgctaaaagctgtgattaaggagaccctgcgcctctaccctgtggttcccacaaactcccggatcatcacagaaaaggaaactgaaattaatggcttcctcttccctaagaatacacagtttgtgttatgcacctacgtggtgtcccgagatcccagtgtctttcctgagcccgagagcttccagcctcaccgatggctgaggaagagagaggacgataactccgggatccaacacccatttggctctgtgccctttggctatggggttcggtcctgcctgggtcgcaggattgcagaactggagatgcaactcctgctgtcaaggctgatacaaaagtatgaggtggtcctgtctcccgggatgggagaagtgaagtctgtgtcccgcatcgtcctggttcccagcaagaaggtgagcctacgctttctgcagagacagtagtaccaagctgggctcctgtctccatgggacttgtccagaagccctggcacagaagttcttggccagtctcacgtcacatgtcacgatgccagattcaacaggggacctctctgccctttccatagacaccagacgtctggcacaatctctactgagcagcacccatttaagacattagagcacctcatatcacaggacggtgcttgggtacaatttaaaataaaatttaaaattc

SEQ ID NO: 491 - DNA, 624 bp, Rattus norvegicus
  Genbank Accession No. AA892376
  misc_feature (1)..(624): n = a or c or g or t
gttttccttttggtttaatcaaagactggtgaataaacataaataccgcacaatgaccagatcattcttcatactgtgcacacacagaccaatgaacagtaatcgcaaagaaacttgcagtcagcagtgaaatgcactcagcttttctttcccttgtttaaaaaaaaaaggaaccgaaagccacaaatttagaatctcgtcagcacatattctgctgtgacaaatgattcaaacataaatagtggatgtaaagaaactatatgctaacatatgtataacctttgttaatgaaaaaccaaacaaacagaagcagccgtaatgattaagatacattcagttactgataactagttgtacccagaagggccttatcaaaagggaatcgtgctgcagagaaaagctatatatacatacacaatgagaaataaactgcaagatcaacgcatgcatgtttaatactggaaaaaaatcacagccctccagaatttctccacatttgttataaaagccctctgcactcaactaaaattaaaatgatcttaaaagtataatacttcttttcagccacagaaactgcaatggaaataaatgttcagagtcattttcaaaacanaaacaaaaatc

SEQ ID NO: 492 - DNA, 527 bp, Rattus norvegicus
  Genbank Accession No. AI137958
  misc_feature (1)..(527): n = a or c or g or t
tttttttttttttttctatacaagccatttatttgaaatgccaactatatggaggataaagtcagtgttacatgcgtatcagtaacagtagaaaaatagaaccagtgaaaacctctgtacaactgtgatggtacgcaaaagagaaacgtgtcgtttacagtgtttcacacagacggattcaagtttggaggtacctaaataaaaatactatatatttctttaaaaaacactatgtacaattgaagcgtaaacaagttttacaaagtactggttatgcaggttgtaaaaacacttgcataggacatgaaatcagtttaagaaagatttctgagcctttagcattgaaggcacttgactttaccattaacagcacaaccacaagaaacgctcagagacattccttttcnctctacatgtcaaatttgcatcccaaagtgcaagatcaaaagcctagtgtgcgaccgcccatcgcgccacacgtgacatcacaccgaactggcatccactcagcacagcatacaacatcc

SEQ ID NO: 493 - DNA, 616 bp, Rattus norvegicus
  Genbank Accession No. AI179883
gaaatttaaagaaaaaatttattgaagatctgaaaaacaactcctacaagattgacttttccataaaactgtagctacacgatgcattgcgtctatcatgttaaaacgtgcattagacacaaatacaaaaaccatgaaaacaagccaccattctttaacaattgagcaaagataaaatgcctaaggaacaacatggatgacttgcaaaggatgggctctttaagcaccatttaaaaaaaaaaaagagcacagatggatgagtgttcagttatacacactgaagggaacctttggcactaggagtcagagcattttgtcatagagcattaacacatattataaaagtgcgtagtgtcaaaggaacagaaccaccagcattcaaaagcagctttgtcaactaggcaaacactctacagcatgtctctccgttgtccatcactgatacactggtagaaactttgaaatgaaaaaaagaaagaaaaaaggagcagttaactccttttattttctctgtttaaaatcaaacaggaaacaaacatcaactctgttatacactaacggtcttcaaagtacatcatttgtacaagagaaggactaagaaccaaactgtttacag

SEQ ID NO: 494 - DNA, 511 bp, Rattus norvegicus
  Genbank Accession No. AA998964
  misc_feature (1)..(511): n = a or c or g or t
tttttttttttttttgtccgattttattttgcagaagttttagaagaatttcttgccaacacagagggaagagtaaaaagaaccctatgcacagaaatacccaagtgaggctcagtcttgtttttcttctactactcttcctttccccactacacagaattattaagagtggtatctataagtaaattaaagaaaaaagttgatattaaaaccatatctcttgagaaactcaaggtcttaaacaattttaatgtcataagcaagaaggccgccaatggaaaatcctaggtaaaaagacaccttttctatgctcctcccacttctaagctgaccaaaatgagtgggtttaattggtattgtgattttttcattgatcccatactctatgtataaacagttgttttcagctcgtcncggtaaacgaactaaaagatcctggacctttttctcttcccatacttttcctgtatgccaccaggaattaatatctgataaattttcaaaattttca

SEQ ID NO: 495 - DNA, 2015 bp, Rattus norvegicus
  Genbank Accession No. AF036537
agagacccaagctgagcctaactggccgaaagagtctccagacttggtcactgttacctgaggaaaagtagctgtcccatgcactgtggctgtcccggccatgtagggagcagcagctggcaaggagtcaggggaatcaagccttagaaagaggaagagtctgccaagggagctgggagagcagccctgccagggctgctgttggctgagggagaggaggagggccatgccatccagacccaacaagaggtcaaagactacaaaattcctaacgacagaaactaagacttcagaaactccaagctgcatcaagttgaggaagtattcaaaccaaaccactgagcgagcatccttccaaacccatgatgtctaaactctcagccgtagacgttgtagacgtcggggttccagctccatctttgcacacataatccaggaagccgctagctctcgatgtcttctgtcaagttatggctcaatggtgcgtcatcgatctctctcgtgggctctgaagaactggagaacctaggatttgtgggcaaaggcgggttcggagccgtgttccgggcacgccacacagcatggaaccttgatgtagcagtcaagatcgtgaactcgaagaagatatccagggaggtgaaggctatggtgaatcttcgtcatgagaacgtgctgctcctgctgggggtcactgagaacctcgagtgggactacgtgtacgggccggctctggtgacaggattcatggagaacggctccctctcagggctgctgcaaccttcatgccctcggccctggcctctcctctgtcgcctgctagaggaagtggtgctggggatgtgctacctacacagcttgaacccttcgctactgcaccgggacctcaagccctccaatgttctgctggatctagagctccacgccaagttagcagactttggcctgtccacatttcagggagggtcacagtcagggtcagggtcaggatcgagagattctgggggcaccctagcttacttggccccagagctgttggataatgacggaaaggcttctaaagcaagtgatgtttacagttttggggtcctcgtgtggacagtgttggctggaagagaagctgaggtggtagacaagacctcactaattcgtggagcagtgtgtaacaggcagaggcgacctccattgacagagctgcctccggacagccctgagactcctggcttagaaggactgaaggagttaatgacgcattgctggagttctgagcctaaagacaggccatccttccaagactgtgaatcaaaaaccaataatgtttacatcctggtacaggacaaggtagatgctgctgtctccaaggtaaagcattatctgtctcagtacagaagcagtgacacaaagttgtctgccagagagtccagccaaaaaggtacagaggtggattgccccagggaaaccatagtttatgaaatgctggaccgcctgcatctggaggagccctctggatcagttcctgaaagactcacaagtcttactgagaggagaggaaaggaagcatcatttgggcatgccacaccagcagggacatcatctgacaccttggctggcactccccaaattccacatactctaccctccagaggcacaacacctaggccagcctttactgagactccaggtcctgacccccaaaggaatcagggagatggaagaaacagcaatccttggtacacctggaacgcaccaaacccaatgacaggcctacagtctattgtcttaaacaactgttctgaagtgcagattggacaacacaactgcatgtcagtacaaccgagaactgcctttcccaagaaggagccagcacagttcggcaggggtaggggctggtagcccgtccacgtccacgagtagacttcggagaggacctgcaagtgcctgaagcaggaaatacaccattcaggcagccagtataaatagagtgaaaataaaagcactttctaagtaaaaaaaaaaaa

SEQ ID NO: 496 - DNA, 604 bp, Rattus norvegicus
  Genbank Accession No. AI232014
ccagaggagcttattgtgctgatttattatacaatgcagttaaaaaaaaatatctttgaggttggcctctccggttcaaagtgcagaactagaaacactgggtgttgacaggatggccgcccacttgtgcgagcgagcactggaagcagggtttggagaacatcaacccatttgctcctcaggggaagccaccttctgagctcccgaggcatgcactgttaactggcattcagttattcagcgtgacaaactttgtaatggcatcgtaggaccaagatagaagaattcctatttgccagacacacacaatgactagaaaaggagaaatacccaaactgagtgtcactccgctgaaggaaaggggaaaggcactgtgtccctctaggaacacatggctacggcatactccacatgctccagattcaccccattaaacacatgacaggaacttaacttctaccacgcacaggtcacgggtggcttgaaactccctctgccctctgttcccacccaagtacagacaggtattaagatagctcttggctttatttacaagttcatcctcatgtttccatggggggtgagaaactgtcaaccaacagtt

SEQ ID NO: 497 - DNA, 573 bp, Rattus norvegicus
  Genbank Accession No. AA799397
  misc_feature (1)..(573): n = a or c or g or t
cacggacaagaagatgaagggccttgagtgtctggtaccagacccaacagcagtggtatccctctgtatgtgctcttgaggtggggatttatagagtgcagatcaaactttggaaagattgcattccctagaagtaaggcagagcagaagccgagcgtttgccatgtgtttgagacagagcacaccctgttgtctgctgccttgagcagtgtgaatgctgtcttaagggctttctgtagagccgccttccattgaatctctctgggcttcacagccctgcatggcctatgctgtgactgtgcaccccaggtcgaggattgtgaggcgtggcttcagtcttgtccctgtcctccctgaaagttccctctcaagtggaggtcagaggctangagaactcctgtcagaatgactgtggtgactgggtaataaattttattgctgtttccttcacaggacagatcacagtgagattctctttcatacaccttctcctagccctggtggggccaggactgcattgaccctggacatcaaagggaagattatgtggctgctaaggccatcagcccacag

SEQ ID NO: 498 - DNA, 669 bp, Rattus norvegicus
  Genbank Accession No. AI230743
ttgtcatcacttttcttcatgatccagatatttgaaaatgcaaagaaaacgaacttttcatgatatgtcagggactggcactaaaaaaaattcagactgcaaatgagttatacaaatgaaatatcaaatggagatccagttatcaaaatgaaagcactcaacatattaaaagttcacaattatttgtacagagcacataaaaaagtcagcttgctatccaaccgctgtgctttttaaagagctactgcagaatttgaagaaaataggcattgttagttaacttataaagagaccaaagagcctgaaacaagtagtaaaaagaaatttttgcctttattagaatggcattaggccttaaatatgccaattttggtaatcacattattgttttaataagaaacgactctacagaattgcaatactggtccaacagtcttgtctttcttttaaagcaagaaacagaatgtaagtaaccagaaagcagggcaggcatcagctaacccaggagactagcttcttagatccaagcgtttgcagagagaaccgttgggctggggaggggtggagcagctcgagataactggaacccagagtgcacgccaagtcccatgaggctgcttgttgaaatcatcttttccttggtcacactggttccctccaatactatag

SEQ ID NO: 499 - DNA, 457 bp, Rattus norvegicus
  Genbank Accession No. AA926328
tttttttttttttttttgggacaattagggaaataagttaaaaacaaatttattattcaaattccagagggtgggaaatttgaggttgcaattctttcttcatctactgggccctattcataaaaacatcagtaactaagagcaggtaagaatcacaatttcagagtcaaactggtttagcaatgtctaatgcatatgagtaagccaattaggcaaatgtgacaggcttcaggcagcacttgtaagctactcgaatgagatgacatcctgctgtccactgctttaattctcctcagcctgggagctgaggcaaaatcaaggtaatgagttgtaagggaagagggtttgtggcaccacacgtgtgatttcatttctctggaaaccacccccggcccaccgcacttcatctgaatgcaggatttgtttaatttgtcccaaaggaatgggcctcgtgccg

SEQ ID NO: 500 - DNA, 339 bp, Rattus norvegicus
  Genbank Accession No. AA957535
  misc_feature (1)..(339): n = a or c or g or t
tttttttttttttttttgacatttcccaggcaattttaatacattcgcccaccaacacaaaaaccctaaacttgctccctctccctcttatctgagactgggaataaaacattcaacacggaagtaataaaagtcgaagcagacatccaagtgcaaagggaaatactgagcacacagtagttttcttgtatggtcgtttaaagtcacagttatcataaatacttacagaaaacactaaatcccctactttgtagacaaattgttttaacagaacacaactttctcncgttggcacacagtgaacaatgaacaagcccgcttggaacacactattagcaa

SEQ ID NO: 501 - DNA, 567 bp, Rattus norvegicus
  Genbank Accession No. AI145556
  misc_feature (1)..(567): n = a or c or g or t
tttttttttttttttttcatcaaacacagattctttactttgtaaacctcttattagggttatagagttctgcttcttacatgcaaaactggtaaccaagtcaggtaaagaaatacttatagagagagagttctggatgatatctttcccctctagttcaatgtgctaagactgagacagaagcagaatttgtttctgtcaagggcagggagggcagggagggcagggagggcaaagataggacctcactaggtaaccctggctaacttcaaactcagagatccagcctgccactggcctaccaggttctaggagtagaggagagcgccaccacacccagtctgttttttgagacaaagtctactatgtaagttcagattggcctttaactcaaaaatcttcctatagccacctccaaagtaccaggattaaaggcatgggccaccatgttttggatgaccttgagctcctgatcttcctgcctgnggtctgaactcagagctttgtagtgctaagccataactccaagtctataagccttcatccttgantcactgtgtatattaa

SEQ ID NO: 502 - DNA, 547 bp, Rattus norvegicus
  Genbank Accession No. AA875537
ttttttttttttttaacaccaagaaaacactttaatcaaactacagaaacaatggttatagtacagaatattcataagcaaaagatacaccatgttttaagtacttacaaagttacaaaccatttgcttccttaacattttctgttttttttttaagttcacaacacaagtatcagatttaccattttgcgctttttttttttgagggaaggggggtgtatttatcatcagctagatgtgctcactgtatgctccattatttatatgcaaggcccgggtgactggaagtgcagttgtcaggcattttaataaactggacagccatttgtttctgcacgacaaggcatctttacacaggagcaatcaggagaaaacaggaaacagccaagcactctgcactgcaacacgccaccttaacagctaaccagcattactcaactgctacacaactgcgcctagtgcacaaaaatacataagagaagagattagaattgtgtcgggtaaacaatcctttaaaaaaaaaataagtcttttcacctgaaaagtc

SEQ ID NO: 503 - DNA, 376 bp, Rattus norvegicus
  Genbank Accession No. AA956294
  misc_feature (1)..(376): n = a or c or g or t
tttttttttttttttttagggttcagttccagctgattttatttccttctcaaaaaaagttatttacagaaggtatatagcaacaacctgacaggcagtgacggacaggattagctggtattttttttttcttttttctttttctcttcccccaaacattgcttttttttttttctttttagtggccttgaattttaagacaaatattctacacggcatattgcacaggatggatggtaaaaaaaaaaaagagagagaaaaaaaaggaaaaaaaattaaagtttaaaaaccaaaaacccttaacggaactgcctcttaaaaggcangggtcctcgtgcctgtcatgttatattaaacatacatacacacaatcttt

SEQ ID NO: 504 - DNA, 268 bp, Rattus norvegicus
  Genbank Accession No. AA899642
tttttttttttttttttgtcggggcaaatacactttattcagtcctggcatcagactggcgagtcctgctgtgggtgccagcgccccagaggagggaatcccctcccctcagctacgagactagttctccaaagaccacagacagtgacatctcttcactcacatgacgttttccgttttttttcaatgtctttttttgttttcttaaaaaagaaaaaaagaaaaaaaaaaggaagaaaacagaaagagaaagagaaaaagagcgcaa

SEQ ID NO: 505 - DNA, 710 bp, Rattus norvegicus
  Genbank Accession No. AI171350
ttttttttttactttttatttttggtttatttaatcttctttcacacaggcattgttagttcaacaattcagtgtttggggttacattaattgcaaactaggaacagagctgaacaaggtacaccaccaacacccgctatgcatttcacccctttctgagggtcagggtgcagcccaggactgctgcctggtcaggactgctgcccggtcatctctctgtgtaggatcacatgtgctattgcacagtaagagtagagttcgagccctgggtctcccaccttcagactgcaatatgacaaagcattgccattttgtaatgaaaaatagctaacacaacggtttagtatgttagacagaacaaacgttcacatgaaataaaatactagcatgcttttataagctaaaacattaataatcctgtggagttaatgtataaataaaatgttacctggaatgaaattacctttatgtgttaaaaaaaaaaaagaaacccagcattttactgttcgtaaacatgcgagtttgaatacctcataaacctatatagttcttggaatggaaaggtcacttcaaagtggaaaatattaaaaattcatttgattgacgttcccataaaacagtccatgctgcttatatgagacttacatttgttccaatgttaaagagacaatatccttttgtcacagaaaagatgtgtactgccatttatt

SEQ ID NO: 506 - DNA, 683 bp, Rattus norvegicus
  Genbank Accession No. AI170407
ctgggtacatgaacatattcacatacatatacacagtcagtttccacatcccacaaacaggctggattacaaagatgaggtatacactgctgatgtgtacatcagaggttcatggctaaagtgtttggttagaatactgcactaacatttcagagcttctctggtaaaaaaaaaatcccattaaaaaaagacattcaaaataagcacattcttctaacagtaaagactcttcccactttttttattttgacatcatgatagttccataaatttaaagtggaagatagctgttcaataaaagccatttcatatatataatatacataagttattttaaaagtctgtcatataacagattgatttggtgctaccaaaaacttacgatacaaataaatgactacaaaggaaaccatcactaaactaagacacacgggaacaacgttgcatttcagggggaaaaaaacccaaataatttctatcatgttaaaggaatcacgttcatttgtcattgtgtgcataatcatattcctttaaagcagactcctcagaacctttaaatttaaaaatgttcaggtataagtctttctgtacattcaaaaacaatcatattctgattacatacaatgctttcatcgtgcaaaaaaagccttagtcaattgttttctaaggtctaacgtcaaatg

SEQ ID NO: 507 - DNA, 539 bp, Rattus norvegicus
  Genbank Accession No. AI233182
cttagaaagttactttattagaattttaaacagtttaggcaatgaaaccgttctaacagcaaatgcacttcctgcttacaatgaaatctatttcaattctgataatgacatgacaggtccatccaagtttcttccaacagaaaagcccacagctcaaaagttacggggggaaacatgactaagccaaaggacttcacatgtttaccacagaagtgatacacattaaaataccacataatactttctaagagaatcaagccacttgtgaaaccattagcaagcatggagactgaaacaactgcttaggcacaggactaactcaggcaccataaaaccctctgtcttctcacttaacaaataagattccctagagacaattatttgggtgcctgcttgtaaaaataaggtacttaatgacggaacggtttcttgatcatgatcatacttgggtaatctcaaggaatgaagatgaggattattagacatgattacattaacatgaaattctttatctatacactctgatttccatgtcctga

SEQ ID NO: 508 - DNA, 420 bp, Rattus norvegicus
  Genbank Accession No. AA946072
aaaaagactaaaaatatttattgtataatgagcattccattccacatacatgaaatacagcatacaggtatctgggatctacacagcctcttggttccaatgttctatcgtctgcaactgtcatttcatcaatactgaggatagttctgaagtgttattaaaccagtaagaaatacttaggattccatccattactcaggactgcctggtcagctacgcatactacagctaaaataaaaaccatctcctcctctgaagttgctccagggttctttggagtgactcctgttgcagcctaacaaccttatccggtgagatacttattagaagcaacagtgctagcaggtgtgatctgggaccaggctctgagggacccttatcctgcttcaacaagaactgaagaagagtccccaggcctaa

SEQ ID NO: 509 - DNA, 471 bp, Rattus norvegicus
  Genbank Accession No. AI011598
caaacaagtcactttaattccatacccacaattttacagatctcagtactgaaagctgtcgggcaagagggacaaagtataaatatgtctgttccgcagtgtaaaccagaaatgacttgttaatcacaaaaagtgtacgcaaacactaggtctgggaacctcaatgccagcgtagcgggaagacactggggttggcctgcctctgggtcagtgcctttccctgcttggaaattgctagggttcctgaggggcatccgctcatccccactgctccctggatgcgtgcagaagcagtcatgttgacaggggccccgttgaacagcagcttcctcagacatcctcggtaggcagggggctctggccaggcagcttcaaacttgggcgggctcccaaggtgcaaaagcgctggagaatcagccaaggtctctggcaaacggcctgtggtgtggttgctgtgtgtgtcgacttcta

SEQ ID NO: 510 - DNA, 531 bp, Rattus norvegicus
  Genbank Accession No. AA925876
tttttttttttttttttacaaagatagggtcatttattcatgttatattactgcatttcaaaggcaaaaatacagatgtctgttctgaatatcaaggtcagagacagccacccactcccagccccagtggtaaatacatctatacacatgggatatcaaaatacacacagagcatcacaggtctgtaacagcccagtgggcagccgagaccctgccaggctaaagggcagcacgtttcctttgcctttctgtgcctctgagctttcccaagggccctgccacacaggccaccacaaatatagacagagaaagacacagcatgggacaacagggtgagaattcccaagtgaaggaaatggtccctgccccctcaatcctccagcccccaacggcatctcctgggtcaggcaaatgcccaggcctaacaacagtgccttgggtgtgccttgggcctgaggtgccccaaagcatgctgggaggaaacggaaagaacaggcaagacaatttcccttgggtctgagaatgaacctc

SEQ ID NO: 511 - DNA, 467 bp, Rattus norvegicus
  Genbank Accession No. AA924985
tttttttttttttttttgagtttaatgtccattagtttattgctgttccataaaaggactgccccagtttcaaaaacaacaccacacagagtcttctccatgttaacagatttcaaaaataaattagaacacttagcgactatcactaccgagcacagtgctgctttcagacaatccaaaaggcacttgggggttcttttttttttttctcagttcctcagagcatcgtgaactctaaattatcgatgccctggtcaactgcaggagtgctgatgaatggggagagttaattgaccattggatagagtggttttaactcagaatgggacagctcgctagcaggacagagagggtgcattcagttcccagcgtactgttggcagccagcagacctgaacagtctccgtcagaaaaatgaaaagccttttagccttcagtctctctcctcactgctggtgaatatatga

SEQ ID NO: 512 - DNA, 477 bp, Rattus norvegicus
  Genbank Accession No. AA925364
ttttttttttttttcttactttagccaaattggtggggcattttctagcccctctgagacccacccttggagcctggcggcagacctggcactccctacctttaggcgttttgaagtcaacaggcagaagtgagggccttccatccgtgtctggaacattctttctgtcctctagtaggattccgtctttcctcagtggtaaagaagacctgtaacagttactaacaagcatctcaaatgggatggtgagaaaacaagggaatcttgagaatagaggtccactgaagaggacaaatagcatttagtcacacagctaaaccaggaggccttcttgggacaaaaaggccgttgtagaaataagcacaagctttgtgcctatgaaacagaacggcaagcagagagggagctgatctgttatcgactatctctctggacttagattttacttaagaagtacctcccttcagtgtcagctca

SEQ ID NO: 513 - DNA, 560 bp, Rattus norvegicus
  Genbank Accession No. AA800318
gaaagtgtctgcaagttttatttgtagactctgttaagcttgaaccataaaagctgcaaaacagtggtttagagagcatgtcaataccatgggggttggtgggtggaaactgttccttctgccagttcctaaggctggaagtggctagggcaggcagtggcgaggaaatagctggatgagctgaagcttgggtggcagtgcttactcaagcctgactcctgcctgtctcaggccctggggtcatatacacggcccatgaagactgggaacttgtgtcgctggtcccagagcaggaagaggaaaggctgctgcacctcaaagatgagtaagtttcgggccacggagatggtggaggctgcggctgcttccacacctgtctctgtcagttccaacaccgtctcgtgtttcatggaagacacctgaagatctgggtcctcagtcagcccacacaggttgagatcgtaagtgaagtcaaagaattccagtttctccatgattgacagcatgtcttggatgctctttactttaatgcgaggcatcatcacgtaagtgggctgaaa

SEQ ID NO: 514 - DNA, 602 bp, Rattus norvegicus
  Genbank Accession No. AA943114
  misc_feature (1)..(602): n = a or c or g or t
aaatacaaacaaggaggaaaaaaaaacaaaaaacaagaaaaaacaaaacaaggcaccacggcccattcaagtattttgcatagatgtacaaatattgtaaacaatcaataggaggacatgagaggagaggactatttcctgtgaacaatctcccgaatcaaaagaaaattcacatttgccctggatcccagacagacatatacacagtcatacaagaggacactgggtgcatgactttgggctgctgggcttgggttctacagaacctctccctagcaggcttccctgggagaggggcacctttccagttggtgtccctggcttgtgtgtggagtccttttgggtctgtcatgacacgcatttgacaaaatgactaacctccaattttaagaatacaagtctcacgcccactttgtcaaataagcaaattcattgagcccagaggagacactgaaggattactggagcgtggcagggagctactgcaacagaagggactgttgaattgcanagagcatccagaccctaacatctacaatgttttggagcaagggttaaaaggggcttttctcttacgggtggaagtcaccaaggctanaagg

SEQ ID NO: 515 - DNA, 501 bp, Rattus norvegicus
  Genbank Accession No. AI137070
  misc_feature (1)..(501): n = a or c or g or t
cggccgcatgttgtgtgtggaactgtttcctcgcgttcccttggtttctctctttgtagaaagtgctaagttttgtacctcaaagcatactaggtcatgtctctatactatattcctaaaggtccacagctaccctaatctaccctgttacctaagatccacagagagtctggaaccttgttgtgaaaagggtccttatttttatataatgctatgaagaggatgcaggtgagctccgatgaatcttctagactttggcacatactgtttctatgacccggaggtccacagaatcncgctccctgggaagcatccatcctatanggctgagagtccagaactcacagccactttccctcnctccacactgactccttgactcccctcctccacaagaagaaaaaaaaatcccatttctggaatagaagagctatgcagccattagagtttttaaatttgattatttatagtcagaatagacatgaatagaatgagaagcta

SEQ ID NO: 516 - DNA, 593 bp, Rattus norvegicus
  Genbank Accession No. AA892511
ccgggctcattaggaaacctttattgtcaccattagagataaaaacatcggagtcccacacgccacaccacacaaggaggctaactgaagggttactgattgtcacagcagcccagacaaagggctgaacctcggtccttagccaccccctcccctgcacgatcagtggcagagggcaatggtctccatgttgaggaagcggatgtgcatcttggtctcgatgtcgatgccctgccagatcttcaggaagtcctcaaaggtgatcccctcgtacacctggtccggttccatctgtcccacgcacacgctggcagcctccatcatggctccgtcggcgatggaccgagctgactccttctcgatgtgaggatttccagagagcagttcctccaccacatttcgatactcttccagggtgatgcggccgtcactgtccgagtcatacatatggaacagaaatttcagcttctccttccgagacagctccacttgttcctcacccagggtagtgtcaatgggccggaagtaggacatgatagtcaggaagtcctcgaagttgatctcatcggccaggccgctggaccccttacgca

SEQ ID NO: 517 - DNA, 444 bp, Rattus norvegicus
  Genbank Accession No. AA964306
ttttttttttttgtattaatacatactttattatcttttataaaacttcctttggctacacaggccactgtgctgaatgacgggtgacatcgtgatggcagccttcagggggccaggatggagccagagtccactttgaaatgggtattagagattgggatgtggtagggagctgctacagtggaccacagtggcctgaaagatgctaagtgtacagtcagctgccgagagctggctggggcgtcagaaaagcagtcagttacccagggtgatagaagtcctttctgtctcacatcctgccaaggccagatcctaccccactagagtcaccagatgactcatcaaaggggcagggacttgtttgcaagttacaatgcatgggcaggcccctcttccagatagcaccattctctcagattggttctgatgctgcctttgcgcctc

SEQ ID NO: 518 - DNA, 613 bp, Rattus norvegicus
  Genbank Accession No. AA818911
tttttttttttttttttcagtataagtttttattaaaaagtgcattttgattaatttatgatttaggtaagttgtaagattatcagtatactctctggaataataactttacaaagatttaaaacaaacaaaaatttaaaagcctttttatttccttcaccattattgttttacaatacaaatatcaccttgtgagtagacactacacacacacatacacacgcacacatacacgcacacacacacacgcacacatacatgcacgcgcatacacacactcttgcacgcgcgtgcacacacacgaaacctacagaaggtaatcctgctgcacataaaatacagaaaggatattatatttatatttatatttatatatatatatacttcttcactcttagaaaactattttgttctccacgttggcaagtatagagtagaatacttccccaaacatacgtatgtcaggagtaaaactcagagttacatgcgctttctgcacaaatatattgtaaagaaatagctctctttttgctgttgttgcccaccagcaaacctgtcatgagagtgtggataactaatttatagctttcaagtttcaggtaagtgatcattt

SEQ ID NO: 519 - DNA, 463 bp, Rattus norvegicus
  Genbank Accession No. AI030775
ttttttttttattatttattgaaaaaaagaaaaagaaaacacagtttggagaaatgtcaagccgtaagtgaacagaagatgcctccattcttagaaagttccgcagcggaggaagagctctgtgatatgtgccacagaggaattactataaatgatggaaaatagaatatagatacaggaagcagacggggtgttgtccaaaggcggatcttctatttgcacttcatgtataacatagtgagcgctcggcaggacgagttcactggaactgatcttttcagctggaggcgctgccccagccggcgacatgggatcgtaattcttcacatccaggagtctgcgctgtctgaccgagtcctcgatgaaggctgggtttgctatctggacatcgttcttctggatggagttcagatgacaccggctcaggacgtcagcactgtcaacgatgacttgtgtgcactga

SEQ ID NO: 520 - DNA, 599 bp, Rattus norvegicus
  Genbank Accession No. AI178214
atcaactaacaacttcggtttttaataacagaaacaattttgccattccagacacaatttcaggggagaaaaaaaatctgccctataaaaataaaacttaaactcataaatatagctctgaactttagatctaaaacgcccctcggcagccgccttcgcctcacgccgttcctgtaccatcgtcacgttccgaagagaaatcaggatggcagcaaagcttcgctccctaaggatctgaaccaggggtttcttcttagatctttgcctctggagcctttttcttccttcaggctttaaacctgctgctgtagtgaccagtgtttgggagagaacatcagtcttcaggagccacgagctgacagagtgccatccagtgacctttccgagacacaaggtgtggggcacacgccatggagcgaggttcggatgaggacagaggagggtgctgcttcatacagtctacttcaagtaaaaaaaaaaaaaattcacagatacccatcagctgctactttatgggctaacagtgtcttaatcggagaaacgaatgctttgcagacgctaagcacgcttggaggagtaattaggggaccaggtggctg

SEQ ID NO: 521 - DNA, 436 bp, Rattus norvegicus
  Genbank Accession No. AA892860
ccatataataatttaatatatgccagccaaacaaagtagtttatctttattcaattaaataaaaacagacctgtcaggtatattatataacattcactatatacacatgatttaggcgatgcaaggtaattctaggtatgctaactgttcaactattagtgaaacacagaaggtgtcaggagcccagcgtgttcctgctcacattgggtgcctgcgtttctgtggacagttagagggacagccacaagccaggacagatattaccagtaaacgtctgagggacagaggggctggggatgagtctagcagagattaacagtctcctaagtgtggatagcatacttgacagttacgctttaacaagttcctcttcgatcatgttcatgacgtcaaagtttttgtttgaaggcaacaccaccacattttacctcgtgcc

SEQ ID NO: 522 - DNA, 704 bp, Rattus norvegicus
  Genbank Accession No. S69874
cgccaccgcgtctccttgctgcttttgtgctctcccgctcgccatggccagccttaaggacctggaagggaagtggcgtctggtggaaagccacgggtttgaggactacatgaaggaactaggagtagggctggctcttaggaagatgggtgccatggccaaaccagactgcatcattaccctcgacggcaacaacctcaccgtcaaaactgagagcacggtgaagacgaccgtgttttcttgcaccttgggagagaagtttgatgaaaccacagctgatggcaggaaaactgagacggtctgcaccttcacagacggtgccctggtccagcaccagaagtgggaagggaaagaaagcacgataacgagaaaactgaaggacgggaagatggtcgtcgagtgcgtcatgaacaatgccatctgtactcgggtctatgagaaggtacaatgaggactggctaactcgtcatcctggacagcagtcagctggctgagggaataagctcaattcaatgagcaggtcgtacagaaccacactgcttcacttctttggttttatttttcatgacttttcatcatagacactttacccgaaacccatgtcagaccgttggtttacccaggatcattcctttggttagtaaataaatgcgtttgtgctaaaaaaaaaaaaaaaaaaaaaaaaaaaaaaaaaaaaaaaaaaa

SEQ ID NO: 523 - DNA, 507 bp, Rattus norvegicus
  Genbank Accession No. AI235915
  misc_feature (1)..(507): n = a or c or g or t
aatatatagctactgatgcctcaggtccagccaccaggagcatctcacccgacgggtaaatctctagtcacgacccttttagaaagacatgtaaatatatactcagatttatacactttgtgttttcttcatagctatgtacagagcccccaagtctagggctcagcccaagggcacatccctgctcccgacctctgactcactgtcttctggtaccaggtatttggtcagcaaagcaaattagtattggaattaagaagctactggtaccgtccatctggagcagaggttgccccaccttcggttaaggcctaaacagaaacctcactgcttcaggagccccaaggcccctgccaccagaacacaaagggctgatgggtcaacaagaacacccaggaagctcttgcttgcacgcctatgccacttgcttccactctggagacctcccagcagttgccaggcagcagggtgggtcttggtccaacacttgggaaggangaagtggcc

SEQ ID NO: 524 - DNA, 431 bp, Rattus norvegicus
  Genbank Accession No. AA900684
  misc_feature (1)..(431): n = a or c or g or t
tttttttttttttttttggcaatcaggctgtgtttaatgatggggagctgctcagagcattcagagacctctgtccaccctttgcccatggcctggccctaaaaagtcagaagcaatccacggagagctctagctcctctccaaggcaggcagccacagtcccttggactttgtgcaaaatactaaatgctaatttggcatcaagggccagctctgacacagagacggtgatcttttgtgcagccagcccaagaaagggaaggtacgttaggaggcccctggccaagagggaacagaacaagtaggaagggggtaggaaaagactccaacttgggagcataggcacagggtaagtttgtaaaaatctcctcttgggtagagggcanacatccaggcagctgagattacagatcctcatctccaatgccctc

SEQ ID NO: 525 - DNA, 446 bp, Rattus norvegicus
  Genbank Accession No. AI236618
  misc_feature (1)..(446): n = a or c or g or t
ccaggccagaaaataactttaattcgagtagcatggacagtctacctcattgcttccttaagtcctgctccattgcctcctcatccctgagtttctgaggaggagcaggagggggggggttggaggaggacagtatntanctcaactnacttcaanggatggccggctgctctcaactgtcatccgggctttggatacaccgagtgactgtcccttctgccgaatctgccatgagggagcaaatggggagaacttgctgtccccatgtggctgtactggcaccctgggagctgtgcacaagagctgcctggagaaatggctgtcttcctccaacaccagctactgtgagctgtgtcacactgagtttgcagtggaaaagcggccccgacctctcacagagtggctaaaggacccagggccgcgcaccgagaagcggccctcgtgcc

SEQ ID NO: 526 - DNA, 398 bp, Rattus norvegicus
  Genbank Accession No. AI236294
ggggggaggcagtcctttaatggggtggggcacaagatagcagaacttccatccaagagccacaggaactgaagccagcgtgacgcggcaggcttttcggtaacaatagttgagatggcacaggtgaagggttgggcaaacaattcagctctggtgagctctgccacgccccactgacagcatctggtacagactaactcaggcgtggaaaacgagccaaagtccagaggcaggagcccacaaggggaacctgaagaagggaggacagctcatcctgatcctcgatcgaagttttagggggcaccaaaacttcctggattcctgagaacacagtagcttccaactaacacctggtcagcaaccgtctgcctgaagacttccaccttgagcctcgtgcc

SEQ ID NO: 527 - DNA, 178 bp, Rattus norvegicus
  Genbank Accession No. U75404
tttttgattgtactcttctatgctggaccgaattcatatgcagatcgaagtcactcctgttctttacagatggtattttgatagatactggagtttgtctgtgttatatctgtccccttctttaagaacaatgttgcattacgttcctttggataaattgtgatttgacaactgattt

SEQ ID NO: 528 - DNA, 2006 bp, Rattus norvegicus
  Genbank Accession No. U53184
gcgcgcgcggccagcgagacctcccggctccactggcggcgcgggcggcggtaaaatgtcggctccaggaccttaccaagcagctgcaggcccttctgtaatgcctactgcacccccaacctatgaagaaacagtgggtgtcaacagttactacccaacgcccccagcacctcagccgggaccagccacagggctcattacgggcccggatgggaagggcatgaatccaccttcgtactacacccagcccgtgcctgtccccaacgccaacgcaattgcagtgcagacggtttatgtgcagcagcccatctccttctacgaccgccccatccagatgtgctgtccttcctgcaacaagatgatcgtgacccagttgtcctacaatgcaggagccctcacctggctctcctgtggcagtctgtgtctgctgggatgcgtcgctggctgctgcttcattccgttttgcgtggacgccctgcaggatgtggaccattactgccccaactgcaaagcgctcctgggcacctacaaacgtttgtaggactcggccagccacaggggaggtagacaagtgctcccggaagtcacccaacccttgcccagcgcagccagaagacgtcccttccttgatctcttcatgagctcgtcttcgtgtcttttagggggtggggaaagtcggaaaagtaacaaacccccaaacccagaaactgctgctggagttgtgccctgcacatgcaaagacgtggaccttgggtgttgctttaagggtttaccgcctgatctcgttaccccactaactgtgattgttactccatttgcatctcgtctgctgatttgccactgcctgccccctcttcctcaagaagaggccttcctggtgccaggctcaaaacccgaagctacagtttgccttatttttcactgtttggcttgatctgtaccatctctcccagccctaatgacagagaccttgccttaaagactttgcggttctgtaattgcagacttctccagcactcagaatcactttcaattccatagagttgttcctctccacacacacccctcccccggtgcacagaagggctgccgacacccaccagactcatacagagaaggtcacaagtactaaatgaaaggctcccagcccaccttgtctcagcccctgtcctgtgaagggactccttcctcacacagtttctgtgacttccttttgttcttaaacacatggaagttacttggcagggagacatttctagaataatttttgtgatcacgatacacccttcattctccgtttgctggtatgtttttagttggtttggttttagttttccacatacagtctagctcgtggccagccttgagctccgaggagatcctccatcttctcctctcaaatacccagggcccagacatttgcctctgcacctgctgggctttttctctcatttttccttaaccagaaaaacaaacgggtaatttcatcgactgcctatgtaggtttggtgtggttttgaaaaccttgtttccatggggccctttgggggagtcagggggcccctgcacgagcccatgcttcaatgccgagagattggctgctggaaccccctgaagcatgatttcatgttttagagatgagcttctgtggtacggtcatcatggtctccaacatcaacagacaaggtagaaggatgtcaacgacaaagataagttcagggctctttctagggtcaccactctgtcctgtgtaacactgacacagtctggccagcctttcaggaggtcctggctccctcctaaacccatgtaggwcttgctgcaagtaacagtgtatgaagtcaacctgacctggaacagaagtctgcatattggttaagatacagcctatgtatcttcatacaacgatccagaagtactagacatcatttttgcagtgaattatgggtaccatacatgactttgatgatatctgcttttaaacaaataaaatctttgatcactca

SEQ ID NO: 529 - DNA, 556 bp, Rattus norvegicus
  Genbank Accession No. AI013075
agaacagccaagatatatttattactaaaaataaaagcaactgaggattaccctgggacgcaatgtcagctcaggaacatccatgacgaaatgtgtatcttccctgattctcagctggtgccttcttccagagtgagttttagtttacaactcataatgaggacaaggaagcgggctccatccctttcctgttcagtctgaagactgaattgggctacactgggatggagacttgaggtgctgcaggtcagtgtcaaccaagggttcatgtgtcaggaactcgggctggtaagacgacacgaaggcttcatgctgaagctcaggcaggtccagggagcctggcagaatggaatcctcatggtcatcatcaaacgtctgtgtcggaaaggcttcaaggctcatagctgcatcattctctggcagctcctgagagagctgccccttcctgggtttgcacgcatcgaatttcacccactggtaattgacgcagttctgagcttctggacaactctgaatcaggttgtggatggttggatgagaaaacccaaaggaagtc

SEQ ID NO: 530 - DNA, 483 bp, Rattus norvegicus
  Genbank Accession No. AA874784
aatttttttagatgttcaggcctgtgaggctgagatttattgaaaagtttaaatgtgaacctttacaatgttaccaagtcatatcgtcctgccttccttaggagtcgacacaaagcgatatccctgaatctgtggtgactacgtcagaaaacttatccactgtccagctgacggcagccgtcgcccacgagcccggtgaacagtcgagggcttccccatatgcaggcgcagagcaggctcactaaaacattgtgcacataaacactgattctccaagcgaaattcctgagccgagctctgtctgaaaacatccgcttcatctctggggaaaggaactgggatgcttgtcaccggcagccagccctgcttctcagatcagaggcactgtcgctgtcactacagccacattcacttggggcaaattagtggtttgtccctccacagaacgttctccacagaaaagggatccgactacacatgcgg

SEQ ID NO: 531 - DNA, 567 bp, Rattus norvegicus
  Genbank Accession No. AI180252
aatggtcttcaaagcctttattgggaaggtagatagcatctacagttgactgaggggcgcagggcaggggatgtaacagtccagaggggagaggagttcagaggagagcctgtcagggtgcaaggaggatcctctcctcccaaaaggcactggtgggcgatcaccctcgatcaagacgtggggcctatacacagagggttgtcagcatacaggcgaccttgaagctcaatacagccagccaaaggtgaacagcatctctcttgaggccatacctgctcagggctcctccatctatgaaggaaaggccccagagggcaggtagagcttaggaagaacagcccagccttctatcttagtgttttgtgcaattaaaactatcaataaaaacctaaataaatataacttaaacactttttaaagagcactaacgtctagcctggggaaagcagttgaagcatccttcagcgtgtgcaaagcagagctgacctccaaggcacctggtggcccaagagcatgagggccccatggaccctgcacataggcacatgtagcctgtcccatgtccca

SEQ ID NO: 532 - DNA, 530 bp, Rattus norvegicus
  Genbank Accession No. AI180414
aaactctgatgtccccttttctttacagaatatttacaaacagggacaggtatcagccaccaaatgggcctgaaagcgggggcagtgcttagatgcgcctcagcgcagggaagacgtcctgaggaaggtcactagtatgacccagctgctctgaggggccaggcagtcccaagcaggtccaggctggaactcaggcaaggtcagtagtgggtgaacccagctgcttagaggccaggagcaggcgggtggcggcactctctgactccgccagcagcctctggttgttgtgtctgaggctccgaacctgttcctccagggctgtcctgtccgccttctccctctgcaggtcctactggagcttcctcaggatggactctaggtgagagaccttttctgacaggctcccaggttctggctcagaattacactttgaagtttccttggggtctccactctctaagatgggctgtccctaccgggacagtgactccagaattgtgttgcaagtggaggcgatctctgagatggac

SEQ ID NO: 533 - DNA, 556 bp, Rattus norvegicus
  Genbank Accession No. AA955162
  misc_feature (1)..(556): n = a or c or g or t
tttttttttttttttttcatattttaacaaactttcctttattaggttactgactgatatgagtcatcataaaacagaacagaacggggatttcagaactatacatgccacaaggctttacggtgatggtgccgggacggcagggaggtgtggtgagtcctggggcggcggagtatgggggacacaggagagccttgctgttcgccagcatccgtgagggtacggccgggtggagatcaagctgggatctatgcggctgaatgtgatccgctccaaaaccagaacgagtaagatttctgtctgacaaaaggcccccctcccaaaaaaggagaatgacctcaaaacgcanagggaatgacttagattctttatctagtctcggcaccacctctgtgccttaaaaattatactctactggaagatgtttatttattttttaaaaaaggtaccctacagcagctgcttaaaatgattcttacaaatatatctatgtaaatatattaaacattttcaacaaataaagtcatctactgtacctgtgcagaaatgaacagaa

SEQ ID NO: 534 - DNA, 612 bp, Rattus norvegicus
  Genbank Accession No. AI008642
aaaagcaaccatgttttaattatgggctaaaaatgtctaatacattaagcatgaattataaaaatccagaatctaaatacaatgctagagaatttcaccatgggaagatgaaggagaattcttttctaagtacattatgattaacagactagcaaatcttatccggaatggtaaggccaaaatagtaaaaccacacttttcctataaaaagttacacatcatctcctactgggacagctatcatacataaagaaacacagacaatgtgaccgccctactgcacgaccgggagtgtcaggcagcctctccttggagggtctaatcatcatcttcctccccgtcatctccatcctcgtcctcctcctcctcctctgagtcgggcgcttcattgtcctcctgatcaaatccgtccaagtatgtgatttgttgcagcagttcgaaaatactttctctgtaatcttccaggtttgtgatctcacagttaaacaagtcaagacttttcaaatttttaagattttgcagagcttctactgtactgaggtctttaattttgtttccactcagattgaggtaggtaagatttggacatttctctgccaggacttccaagcc

SEQ ID NO: 535 - DNA, 524 bp, Rattus norvegicus
  Genbank Accession No. AI031002
tttttttttttttttttgctaggaggaaattttaatattttcttactgctttatcaatgtcatggaaaaaaatacaaagtttagagtctagaaccaaccaggtagatttaggagaggggtgtgtgtgtgctgctggctagagacacagctctgcagttctgtcagtgcctacctgcgtaggagcaccagtcaggagcccagtgagcatttcaggatcagaaggaggcctctggaagcagagcaaaacagatttcagaaaaacaaagagccaggaactgtggtgcacacttgtaaccccagctcctagggaaagggaggcttgcaggagcttgaggctggcttgggctacagagtgagactgtacctcaaaaagccaaaaccaaacaaacaaaaacccacgttcatttccctggaatccaaatcaaatatggtcctgttttgtttcgtgtttttgctaagcctggcccttaacccaaggagaggacactaacgagccaaagcacacatcacactgggatataatg

SEQ ID NO: 536 - DNA, 513 bp, Rattus norvegicus
  Genbank Accession No. AA858930
ttttttttttttttattcatgcttccgtttattcagctcatataaaagtctcttaagaatgcatttgagcacaatatataatagtaataatattataacatacattgtgagaaacttttgaaaacaatataacgtccacctggaacaacgcagtgttacagacgtaggaacccattggtcatgcacattttgtgccattttctttaactagttgtcacaatgctgaactgaagcatgacacatattttacaaactgaaactgacaccaggaagaggcctaacaagtgttatcagaagcttcacatttgcataatttatgacatcagttcacattctacgataaaaattcacattgtcttcttgttgcctttgatgaatttgaacagggctcccctgcttgtgggcagcatggagactagctctgccaaatcagtagtctggggctactcagtatcatctgtgagcaaatgtagtgttgttttattagaaccaaagccacaattagagcagagc

SEQ ID NO: 537 - DNA, 482 bp, Rattus norvegicus
  Genbank Accession No. AI103403
aaggttataaaactgctttaatggaaagtccccctccccccaatacaccatctgggctggggtagatgtggccagggctggccccaggacaatactgagcctgtagtcgttaccaaaatatacatctgtcaccataaaaaaatgctgcaccgcctcagccccacaggtataaaatcataaatatttacactcttccatgactttcacagaactgaggtgcagggtagctgagggaggaaagatgttctgaaagttcttggagccaggtttcttgaagcggtgcaacggtgagctgccatagtccttggtcaggccctggtcctcctgtccctcacgaggctaggatggaggtgggcgtccaggaaggacattaaggcctagaggtcagcccctcaactgggcatagtcagaggcgggcagagaacaaaactttggtccaaaatttgaaggtaggacacccacaagcctcagggttcaagttg

SEQ ID NO: 538 - DNA, 503 bp, Rattus norvegicus
  Genbank Accession No. AI104979
atctttcttccataggtttaatttattaaaataatttcctacaaaaatcaggacgaacactgagtgtgctgtgcatccttctcctggttctttacacaggacagtgctgttcagcgggttttgcttttcagtttctgtctggtacgttttccgggtctcttgtttgcccctttcttcccaggccttctggggcccttgccatgagccaccttgccccggaagctggagacatcgtcgtagctctcccgtgtgttccatttggagcctttcttctttccgccaaaaccaaacttctgatttttgtatcttcgtttggcattgggccctttacttatctgctggcctttagctcctcctgcctttgcacctcgttccacaggcttctgatcgccctcaaggaaatccagcttatcagagaagcctttctggtacttcttgatggcattcatcatatgcgctttctcctgctgcctcttgtgaaggacctcagtttgcaccttctt

SEQ ID NO: 539 - DNA, 589 bp, Rattus norvegicus
  Genbank Accession No. AI176845
aaatactttatgtcgtaaaaatacagcaaaaatagttcttttgttcaaagaccaaaatatatactgctctggtcacggtcctaagggtggttttagtctctggttcctcgattgtgcagtgtgtagtgtaggctggcttcaacccggctactccagcttcagtcatttatcaacgctagaatcatactgtagagatacatgaagaaacagagtaggtagaaaccaagcttgatcatggcttctttcatgtgtgactttaactgtccccggttgtgtatttctgttggatcaaatactcccatgttaccacttggcaccataatgaacctatatatattccatgtggcaacaggtaagttgagaaggaagatgacccagtgcaaggaaacaagcatcagcacagtgacaaaggtgtggccaaccaactctggtatcacccacttgtttaattttgagcaacatgatctagcgttaatgtaatcacattctaaatcagacagtgtaatgatgaagtagacagagaggaagatgagcgaacaacagtcgaggagcgagaagaggaacaccaccgtcttcatcccctcgtgcc

SEQ ID NO: 540 - DNA, 616 bp, Rattus norvegicus
  Genbank Accession No. AA799744
caaacaggaaattctttattgcaaagatacaaaagcagtcacggcgacatgtacagcaataaattaggtggtggccatgaggcagggtgcagacggggccaacagtctgtgatcttgatctcttctcaataatttataacatgggggaaaaaaagcacaaaaaaaaaataaatattgaaatgaaattgccaagtggcaggcggctgaggatgccaggcctcggcatgatcggcatgtgtccctgacaccttttgaaatagttaaagcttgctttaagaagtcagaggaacaagacagaaaactcacttttatctttaaataaaaacatccatatattattaagttgtgacaatgaaatttcagtgacacgaagccatggggcatgctcacacccttcccagccccctcctggcaggtgtcctctgcaggtgctccagtggtactgacagccctgtctcccctggccgccaagagtatggggcctccacccaggaggaccaccagaggccaggagcgggcagcaagccagtcagtggtcacctgcctaccctggagaccactcatccagttacccggcctgccagcaccaccacagaaagactgatggaggctgttg

SEQ ID NO: 541 - DNA, 537 bp, Rattus norvegicus
  Genbank Accession No. AI029969
tttttttttttttttttccttttaaagatttttaataggtacttaaaaatggacagttcatatcacagttacggaactgtgatcctgttagctatgaggagtatgcatttttttccagtaaaacagtttcatgcttataaaagtcaccgaaggtcaagttgtggcaagagcacgtacaataggaccaatccaagtagcaaagagggggaggcagagaggttagaaagcagtcacaccgttgacacgaaaagaacaacgaatacacatttctgtattttgaaggcaattcacaatcatttccaggaattctgtgagaatttaaggccatttgttctaaagaaatgtagacatgacttcacaaaactgtagtttgtataaaaactgtacattgaaaactatttagaattgattgtgagcaggcagatcagggcggaggggtgggctatttcacacacaggcaggtcgggccacaggggtgagtttatttcacaaatgtgttgtgcgctgagtcacggggtcgtgtacgtggaactgagg

SEQ ID NO: 542 - DNA, 629 bp, Rattus norvegicus
  Genbank Accession No. AA892897
attttaagttattttatttttcattattttctaacacacagagttagaaaaatgcattttggcaccatgaataaagactttcttcaagtttaacctttaaattaaaaacagtagctctaataaagatatttaaacctcattcagagaaatattaaaaattcaaataaaaattttgctgtgggaatttttaaaaagtggggtagaggaaaagtaataacaagactaagaatgagaaagtagtttatgatgaggaaaagaaatgcccctcctccaggaaaaacaaagagaccaactaccaactacggccaaaggtaagaacaggctcaaaaactattttcctgatataaaattcaagtacttaatcgttaaaaaagaagatagtaaaatgtactactaatctcaatgaaactgatatttttccttactattttctataattagaggggaaaaacagaaggaaacacatcctgtttgacttggagctgacgcctgaagcactctgtaaagcaggcagatgtgagcttcccctgagagcttgccctggagacacacaggggcccagtttccaacggacaggagcacctgcctcacaagctgaggatctccagtggatgggcttccactggcca

SEQ ID NO: 543 - DNA, 716 bp, Rattus norvegicus
  Genbank Accession No. AI169231
  misc_feature (1)..(716): n = a or c or g or t
ttttttgtgttgtactttaaagtctcaaaaacaaaacaacatcccatacaccccacgataactctcaatcatggctaatcactgggctggtctataaaacttatacccaacactgacggccagcaccactcaactgcactcttgaaagcctcttcagtggacgggaaaagcaggaatagcatggaaaagtcaccaattctgtccatttccaagagagacatacacaggtgatagataacatggtccagaaacggctgtcctctcctctcaagacaaacgcccagagcggcaagtattaggccatagaacgatttcaacaagacgttacaggcctggcgaagagcacgccctgtcgtgtatggagaagactgctggcagggaaggggaagaaaacaaactagatagcaggcctgaatgccaggaatctctacatttataactgatcaacagtactgctctctcccgtttgctcaattttcacactgtctggaggactttgggaggcctatcttcatcactgtatgtgttagaggtcacttctgctgaccaccttctgtagtctggcttggctggcctgggaggtataggaacccggggcgggatctcaggcttgtcttcatccgagctaggagaggctctgtgtgtgcagctagatatccggatggctggcttgttaaacgacccggctggtcctgaatgagacctncttaatctgc

SEQ ID NO: 544 - DNA, 615 bp, Rattus norvegicus
  Genbank Accession No. AA799773
ccacatgtgcaaaagtttcccagagagttgggccccacaatgtgtaaaaaagacccccaatggggcagagctgtgtaaccataaaaaaaaaatagtaagagaaatcagtttcccaggaggcctggcttgggtggagcatgtcactcagggccagtccgcatgcggtgtgctgtttgttctggaactgctttcttctgattgttctttcttttccaagccccttactctagggctatggccaccagacggcctgacagagtcctcaggcatggtggtttgtgaggatgacttctttcacacacagataccccaactcagtgcttgcccactggcatcagccccactatgatccccagggcttccccccaacccgtttaaccccttatatcacagtctcggcccccagcttcaccaagtcttccctcaggacacctttgagggacactgaaacaaaacagataaaggcccggccccccacccaccaagtggcacagtggggtacgggggattgtatcaccccgtcacacctaaggcaggtgttttagtgtctgattctgtgagtgtggataggggggtggcacatctgtgtgggtatgactttggcaggaagtgggg

SEQ ID NO: 545 - DNA, 623 bp, Rattus norvegicus
  Genbank Accession No. AI235234
aaggggaaatcatccatttattgtttaaagatcgcaagacaacatctgaatttctgaagcacaattttaaatgctttactttttcaataaagcagagtataatagaaaagaaaaacaaatcagtttccagtaatatctattactctattcagaattaagtcttccacagacaggttacctggaaataaaagcctgttacaataagcaaagctttaaccagaatggctacttgtcgtgccagaaaaaagctcattcctataggaggaatgatgtgctgtgtaaatggccacagatctcagccttagcggcactggaagtctattatccaatcccgcattgagtagttcagtgaattttgaaaatcagtttacctgtaaccatgctggcaatctttaactgatatttattcagttaaaaaataaattaagaaatctcttaactgatgttccttgatttacattactaaaggtacacagttcatcacaatgcaattctgctatcagaattacatgagactctttgcttaggttttaattagcagtaaggatcacaaattcaagttcttaattatcaataatttgtcagctaaggtacattcaggcaagagctgcaactacagaata

SEQ ID NO: 546 - DNA, 484 bp, Rattus norvegicus
  Genbank Accession No. AA945962
  misc_feature (1)..(484): n = a or c or g or t
caagggagactttaattagcatttaacagaattcatttccgttcaatcaacagagtttctaatggccccatttgacatcagttgtttcagcaagttaatagcacagacatgtaggaaatctgactggaaacaagcaaccctttccatatgttgaaatctgaattaacataataaattaaacataaatgactaagttctcagcaacaattcattatttctgcatcaatagtaaaatagaaaatacttcccaacttaaaaccacaggtctaaaaattgattaggcatttgactcttaaggccaacgttacatagtgaaatatgtcattatgttaaaacacttcacacagcaagtaagtttcaatgaatataaaaacaagccctgtgtggtggtacacacctttaactcccagcacctggaaggctcanaggcaggtggatctctgttagttcgaagccagcctggtctacatagtgagttccagga

SEQ ID NO: 547 - DNA, 472 bp, Rattus norvegicus
  Genbank Accession No. AA893717
ccacataatattccaaatacatgtcttacagataagggttagtatgagtatcagaaaacatcccagggaaggaagccattttagacactggaaaatgctaaccaaaaaaccaatgcttacatacacatgtctggaaaaagctcaccacctaaagtgcaaagacagaagcaactaacgttctcgctgtatgaaaatagacaatcttctgaactattagctggctttttaaataggctccactggacaaaggacaaagggtcagtcgtcagaatgaatcaggctttaaaccaatctggctttgaccccaatcaactgcaaacaaagtccaggttgaggctgactagagactacacgccacgtgggatcatagcctctagcactttctacaactcagacttaacccagttagaagtgagtatcctcagatcagtgcctcggcctacccgccgcacaaggctcccggacatgtgtc

SEQ ID NO: 548 - DNA, 552 bp, Rattus norvegicus
  Genbank Accession No. AA893529
gatgaggatctgtttctattaaatacaaattgttgtcagctaagcataggaaaaaaatgctactatagacgggcttgcttaaatgttgttaatcggtgacaacagaattattttttttcctgtgtcaatgattttaatgagaagtcctgcttctccagaagcctctgctggctgctctgaaatccttcctgactagtggacagtaagtgacgcagctggggcgagcatcttggcctccaggccgctgctggactccgcgctgttaggcaaggagcaatctggctcttgtctcctcttaggagggacgtacccgctgaggcgagaggccaagctgcgtcttgcgaggtggtctgcctgagctccatcctcttcttgtcaggaccgtgcacgacactgtgcctcatgagactttgtttcactgcaaacgtctggccactgccagcgtgctcacacacagatgggcacttttcctcacggaaggagagtatgtggcgctgcaggttgaacacggctgtgtaggttcttccacagccttcccgcggacaacggtac

SEQ ID NO: 549 - DNA, 1121 bp, Rattus norvegicus
  Genbank Accession No. X05472
aagatgaactctcaatcctaaatatctatgccccaaatacaagggcacctacatacgtaaaagaaaccttactaaagctcaaagcacacattgcacctcacacaataataatgggagatttcaacacaccactctcatcaatggacagatcatggaaacagatattaagcaatgatgtcgacagactaagagaagccatgagccaaatgggcttaacggatatttatagaacattctatcctaaagcaaaaggatataccttcttctcagctcctcatggtactttctccaaaattgaccatataattggtcaaaaaacgggcctcaacaggtacagaaagatagaaataatcccatgcgtgctatcggaccaccacggcctaaaactggtcttcaataacaataagggaagaatgcccacatagacgtggaaattgaacaatgctatactcaatgataacctggtcaaggaagaaataaagaaagaaattaaaaactttttagaatttaatgaaaatgaagatacaacatacccaaacttatgggacacaatgaaagctgtgctaagaggaaaactcatagcgctgagtgcctgcagaaagaaacaggaaagagcatatgtcagcagcttgacagcacacctaaaagctctagaacaaaaagaagcaaatacacccaggaggagtagaaggcaggaaataatcaaactcagagctgaaataaaccaagtagaaacaaaaagtaccatagaaagaatcaacagaaccaaaagttggttctttgagaaaatcaacaagatagataaacccttagccacactaacgagaggacacagagagtgcgtccaaattaacaaaatcagaaatgaaaagggagacataactacagattcagaggaaattcaaaaaatcatcagatcttactataaaaacctatattcaaaaaaacttgaaaattttcaggaaatggacaatttcctagacagataccaggtattgaagttaaatcaggaacagataaaccagttaaacaaccccataactcctaaggaaatagaagcagtcattaaaggtctcccaaccaaaaagagcccaggtccagacgggtttagtgcagaattc

SEQ ID NO: 550 - DNA, 668 bp, Rattus norvegicus
  Genbank Accession No. AI105080
atcaatctgcaatttttattgtatcacttaacacattttttttaaaatgtcatgacactctttgaatcttaagttgtctattcaggttttgaggtttaaaatgttctaagaacctccttgtcttaaagtaacagactggaatgataagcaagtgcatgtgaagacatatccataccaacaataggaacgtttttcaactgtgcactctaacatagacatatgtactctcatgggccttggaccttctaagatgggttcttcttaccaacactggcagaggatgctttcaaccctgtggccatccagaaaaagcagtcctacatagagtgtactatggaggaagagcttatcttcctttcacatcatgtacaggtcaactgtggctatacttgaagagtgagttccagtgacaaccatcacctaagacgtgcataaattcctataattagtgccagaaggacaatatgtttcactgtatagacaccagctgtccagtctagcttcaggacacctaggctttcagacatctgatacaaagggtgcttctggagtgatggcccctggcaactgtctatattgtggccacttctgaggaagcatcgctgataaacacaagctactgtgtttactctgtcacacaaagcctgctaactgactactccgatctg

SEQ ID NO: 551 - DNA, 490 bp, Rattus norvegicus
  Genbank Accession No. AI011285
aagatttctttgatagtaacttttattagttgtacaaagctcattcagtctattgctcatttaggatgactgttgacaaatatagcacatggggcaatttgagccacactgaattacactccagaagaaaaaaatgacatgctaaatcaatgtattttaaaatttcagataaagattttccactgtaggtaccaaattacaggtactagtttttgttttggtttttactaactttaagacattataatgtttaatggtaaatattactaagtacattttgatttataatatttcaacaatgttttcttacacttatttagcctgtttattgacattcacgtaaaagagcacatagtccaaatgcaactcagaatggtgacctctaaaccttctgttaaactaccgtagtaatttatacaattaccatagtaatttacacagttaagaacaagacaaagatcagagcaagtgatggcttacttgattttac

SEQ ID NO: 552 - DNA, 147 bp, Rattus norvegicus
  Genbank Accession No. AA859114
tttttttttttttttttgggttttaatttaattttatttttgtcacatgggcagtataggatggtgttagcccatccttactccgcttgcattgactgtgcctcgggtcttaagacgctaaagtgtcatttagaactcactcccaga

SEQ ID NO: 553 - DNA, 587 bp, Rattus norvegicus
  Genbank Accession No. AI009713
agcttggcaaattaattttaatatacagatacaaaatgacaaatagagattcacagcatttacaagaaatcaaacaatagtattaaaaataatacgaacaaacccttcattcagcaaaaatgcacatctagcacacaggtcctgtttcagtgtcaaagccagctcacaggctctacagcagcctttgacttacacggacgatggcaccgcggcatgggttagttatcaccaaaagcacagcctagatcggcaagtcacgcacagtgggtaccagtaagtatcccaaatataacagaagcggctcaaagtactttctatattggcaatgcctaggagaacagtaaaggcaataatggggtgcacgaggtggctaagcaaacttacatacattatacaagctggggtttctctctcccctctctaagactggctacaagtttctacctactttggcctaaatctttcaaacgcccctttccctggatcctgagaagaaacaatgtgtgggcacactgtgcccaaaatcctgtctgtcagctgctgaaagacattgacttatacttcttggcactggcctgaggacactt

SEQ ID NO: 554 - DNA, 637 bp, Rattus norvegicus
  Genbank Accession No. AA800749
aagcaccaaaagtacacagcaatggttggtacataaaaagcacaattattgatataatttcttaccatcaagtttacaatctaaaataaaacacaagaatattgtcagcccacatcaaagtttccttattttggaattggctactttggcaaatgaatgaggcaaaatgtcctatttcaggcaaagtattaataaggctttgaatatgacacacaaaatattttttgtgtatccattttccatgttacattatggtaactaaggacaaaaagggcacttagaaatttcataagcacaatgaattacttcagattgttctcagaaactcagagatgttcaatgacaaatgccagcagccagtgaaagcctacaattaataggaactagataaagtctttgtcttggccccatttagacctccatctccttccttactaagggctctaatgttataccccacagtgaaaggcaccatctctagatgaattactacataattatgagatcaagcttactggaatattgtctaaagagaagtgagcaaagccagcagtggggactctggctaagtgatgtcacacaagcaaaggcagtcaggcaaggccacgcacatctaaagagattgggaaagcacagg

SEQ ID NO: 555 - DNA, 2217 bp, Rattus norvegicus
  Genbank Accession No. X70369
tgcccccggagagaaaggtgaaggaggccctcctggtgccgcaggaccccctggtggttctggacctgctggtcctcctgggcctcaaggtgtaaagggtgaacggggcagtcctggcggtcctggtgctgctggctttcccggtggccgtggtcttcctggtcctcccggcaacaatggtaatccagggcccccaggacccagtggtgctcctggcaaggatggccctccaggtcctgcaggtaacagtggttctcctggaaaccctggagtagctggaccaaaaggtgatgctggccaaccaggagagaaggggccacctggtgctcagggtcctccaggatctccaggtccacttggaattgcagggctaactggagcacgaggtcttgctggaccaccaggcatgccaggtccacggggtagccctggacctcagggtatcaagggtgaaagtggaaagccaggagccagtggccataatggggaacgtggtcctcctggaccccaaggtcttcctggtcagcctggtacagctggtgagcccggaagggatggaaaccctggatcagatggtcagccaggtcgagacggatctcctggtggcaagggtgatcgtggtgaaaatggttctcctggtgccccaggcgctcctggtcatccaggaccacctggtcctgttggtccatctggaaaaaatggtgacagaggagaaacgggtcctgctggtccttctggtgctccaggtcctgctggagctcggggtgctcctggtccccaaggtccacgaggtgacaaaggtgaaactggtgaacgtggctctaatggcatcaaaggacatcgaggattccctggcaatccaggtcccccaggttctcccggtgctgctggacaccagggtgcagttggtagtccaggccctgcaggtcccagaggcccagttggtccacatggacctcctggaaaagatggatcaagtggacatccaggtcccattggaccaccagggcctcgaggtaacagaggtgaaagaggatctgagggctcgcccggtcaccctggacagccaggaccccctggaccccctggtgcccctggtccctgctgtggtggcggtgctgccattgctggagttggaggtgaaaagtctggcggcttttcaccatattacggggatgatccaatggatttcaagatcaacactgaggagatcatgtcttcactcaagtctgttaacggacaaatagagagtcttatcagccctgatggttctagaaaaaaccctgctcggaattgcagagacctgaaattctgccaccctgaactcaagagtggagaatactgggttgatcctaaccaaggctgcaagatggatgctataaaagtgttctgtaatatggaaaccggagaaacatgcataaatgccagtcccatgactgtcccgcggaagcactggtggacagatgctggtgctgagaagaaacatgtttggtttggagaatctatgaatggtggctttcagttcagctatggcaatcctgatcttcctgaagatgtccttgatgtacagctggccttcctcagacttctttccagccgggcctcccagaacattacataccactgcaaaaacagcattgcctacatggatcaggccaatggcaatgtaaagaagtctctgaagctgatgggatccaatgagggagaattcaaggctgaaggaaatagcaaattcacttacacagttctagaggatggctgcactaaacacactggtgaatggagcaagacagtctttgaatatcaaacacgcaaggccatgagactccccatcatagatatcgcaccctatgacattggtggtcctgatcaagaatttggtgtggacattggccctgtttgctttttataagccaaactctctgaaaccccagcaaaacaaaaaccacatccatgtgttcctcttgctttaatctcgtcaaccagtgaaagtgaccaactaaattccagttatttatttccaaacttttggaaaaagcataatttgacaaaaatagaatacaatttttttgctgtttcacccaccaatacagttcaaatgcttttgttttatttttttaccaattccaacttcataatgtctcaatggtgctataataaataaacatcaacacttttatgataaaaaaaaaaaaaaaaaaaaaaaaaaaaaaaaaa

SEQ ID NO: 556 - DNA, 522 bp, Rattus norvegicus
  Genbank Accession No. AA817726
ttttttttcttttttttgaaacacaaagtcccatttagtgtttttttctgatgcacaaaggagttcactcaatacattaacaataagcaaatcatacagatactgaggggaaggatgtccccttgactacatacacatatatgtatctattcttaagaacagcaatcaagaggttaacaataatggaaggaagaagtagacaggtaagtcactgccaaataacacaagttcataatgatcggttactcaagtaacctggcaaatgcctgctcagaatttacatttactttcctcattgactttcttgcctttgtgtttcagtgaatttggactaggtccaaaaactagaccttcaaaactccatctctcacattcagtgctgaagatgggcatgaaggtggagtatacttgagaacatgcatggtaacgaatgtcaaagagttttctcacagtgacctttcccctgtctgcttcttcccacacctttagaaatattttcatgcttcctctggagacattaga

SEQ ID NO: 557 - DNA, 526 bp, Rattus norvegicus
  Genbank Accession No. AI236590
tttttttattttttcacaaaatagaatactttttattataaatttcacatacagaagtacaaaccacaaataggagcctctcgattgacatcctcagaaaacctaaaatacaggtacaggagacactttcccaagggtgctttcaaatgctcaacatcaatcattgaaatgccccacgagctcgtgcaaagaggcctccattcctcctccagacactgaggggagacccattttctttatgactcaggaccctggggtgtgtgccctgagagggaccatgacattgtctctgtgttaaagaacttgagaggaatttgcaaaccgcactgctggggagaaaacaactgatcctgcagctgggttgtggggtgaagccaaactgcttctcctttttttttttaaatcttcagtttgctaaaggcccaaatgctatcacattaggggcctttctagactttgctttcaatgattggagaaaagagaggagaaattaacaatgccatcatcttttgtgggggtgggggag

SEQ ID NO: 558 - DNA, 325 bp, Rattus norvegicus
  Genbank Accession No. AI058364
tttttttttttttttttaccattttatgaggcttaaagataaatacaggactctcctcatattgtcttctgaatgatactttccatgtcccaatgtagacaagagaataaactggctaaagctggtcttaaaatcttggagcctgtggtatgggttctgcggagcctatgcacccgacaccagaatggggagcatgattctcaactgtcacaggtgcaaagctttgtgactgagcgtaaagtcttactcttgccttgaaagcttcaagctcatttttgaatgcttcaaaataaccttcttcctctgctttggctttctggaaaaa

SEQ ID NO: 559 - DNA, 516 bp, Rattus norvegicus
  Genbank Accession No. AI031004
tttttttttttttttttaacagtcacaacaaattttattttgattagtttctctgactctaaaaatgtggggattaaaggcaaattttgtggggaaagggataaagacatttggaagaaaacacaaacgaaaacagatatatctgaaaagctcttttggcagatttcaagatgacaaaaaaaacccagaatttttgaacagccttattaaagtatacagaattaaaaacatttacagtattatttttagaaaccaatattttggaatgtacatagcaagttcattctgtgagaatttttttcgtaggagaacaacgatatcacatctgaacaccccactgtttgtatttacggtttcttaaattttgtaagaaaatagaaagtttacaattaactatacacttctaattgtgtaatatttactgttgatctttaaattactttgataaaaccaatgtgatagagatttttttaaaaaagattccaggatttttttaagatcgtgacaaaatttctt

SEQ ID NO: 560 - DNA, 550 bp, Rattus norvegicus
  Genbank Accession No. AA942770
acaatgttccctcataatgcaagacattttggacttcacatttttaagccagaggccactcctgtctgtttctttagagtggtcactttagaaagcattgataggcggttgttgaacgttgccacggaaacacattcaagatgttggtggtcttctttgctgcctgctttgggttaaaatcaacatgaagcacacaaacagaagcatacgtacatttgcagcaaaggccgctgcaaatacaaccccaaagagaggtggggctcagcgatccatctcacagcaatgcagggagcctttgtgcctcctgcacaaaattagcacattcaggggagacgtgtgcctcacaaagggccatgtggaaagagttattcactctcatccaaaaatgaagacagtctgagggacaaaattgttcatggactctgctcccaacgctccccccattccccaaacaagccaatgctcaagacacctaccaaagccatgggcaaacttgaccatgagcaaacaatatgaatgagaacagaatgacgtaatgccgttgtgcctg

SEQ ID NO: 561 - DNA, 1639 bp, Rattus norvegicus
  Genbank Accession No. J02827
tccgcggccaagatctggaggccgagccgtggcctgcgccaggctgccctcttgctgttggggcgacctggggctcggggcttggctagattccaccccagcaggcagcagcaacagcagttcccatccctggatgacaagccccagttcccaggggcctctgcagagtttgtagacaagcttgagttcatccagcccaatgtcatctccggcatccccatctaccgcgtcatggaccgacagggccagatcatcaaccccagtgaagatccccacctgccccaggaggaggtcctgaagttgtacaggagcatgacgctgctcaacaccatggaccgcattctctatgagtcccagcgacagggccggatctccttctacatgaccaactatggcgaggaggggacacatgtggggagtgccgctgccctggagcgaacggacctggtgtttggccagtaccgggaggcaggtgtgctcatgtaccgggactacccgctggagctgttcatggcccagtgctacggcaacgtgagtgacccaggcaagggacgccagatgcccgttcactacggctgcaaggagcgtcacttcgtcaccatttcctctccactggctacgcagatccctcaggcggtaggggcagcctatgctgccaagcgggccaatgccaatcagatcgtgatctgttactttggcgagggggcagccagtgaaggggatgcccacgccggtttcaattttgctgccaccttggagtgtcctatcatcttcttctgccggaacaatggctatgccatctccacaccaacctctgagcagtaccgtggggatggcatagcggctcggggccctgggtatggcatcatgtcaatccgtgtggacggcaacgatgtgtttgcggtgtacaatgccactaaggaggcccgacggcgggctgtggctgagaaccagcccttcctcattgaggccatgacctacaggatcgggcaccacagcaccagtgacgacagctctgcgtaccgttcggtggatgaggtcaattactgggacaagcaggaccacccgatctcgagactgaggcagtacctgctgaaccagggttggtgggatgaggaacaggagaaggcctggcggaagcagtcacgaaagaaggtgatggaggcctttgaacaggctgagcggaagctaaagcccaacccaagcctcctcttctccgatgtgtaccaggagatgcctgcccagctgcgcaggcagcaggagtccctggctcggcacctgcagacctacggggagcactaccccctggaccactttgacaagtgaggccctaaccaccacaaggtgtcctgctctgagtggagctggggggcggcaggacgctgccccccgctgctaaccagtgctgctgacgtgctgagcagccagtgtggcacgcactgcggctcccccaggctacttcactggggcaccacatttgcagccattgctgcagctccatcactcccttcacctgttacagtgccttttaggggtggggaggaaccagggccagggcagaccctttggcagggtggccctggatttgctcagagaaatagctgattggcagagtaagtaaaccacagctctgcctttg

SEQ ID NO: 562 - DNA, 442 bp, Rattus norvegicus
  Genbank Accession No. AA965207
tttttttttttttctataacggggatgtttttattgagactcgggaggtcaaaaaactcagaccagggaatccggacctgatggatatcagggctttgccagtggtagaggcggccccatgggggcaggacaagcacccactcctctgtcttcagcagcgtctttagcaaggatgccacccggatatagacatccctgcggagattaaagccttccggggggttgacatcatacagaaggtaccgtctgcgggatgccgcccccgacaggatgtccgccgccgactggccaggccagaattcttctcctgaagccgagaccggccgccaggatgctgctgccagcagcagacagacgacgctgagcgccgccatggccccggcggccacgcacttccggctgccgcgccccgctccggaagcgcgcctgtctgcccggcgga

SEQ ID NO: 563 - DNA, 407 bp, Rattus norvegicus
  Genbank Accession No. AI044338
tttttttttttttttttcttgccaaacatagaactttattatatttctagttgcgtccctttgtattagattcagaatcaagtactggacagaatagctctgaactatgtccttgggctaataaggtttctactccacctgataaactggcttctatccccaccatggtgccagttggaggcacttggattacagagaaacagcagctggcttgaagaggggttttagtctaaaatctcccagtaggaacacagaacagattgaacttgtgttggggaggaaggttgctacataccagagtacgtttcagtttctcaaaccagaggggcacccaaggcactttccctgtccccactcatcccacaatccaccttacttgctgacctccacctctgtgtgtcaaagca

SEQ ID NO: 564 - DNA, 323 bp, Rattus norvegicus
  Genbank Accession No. AA942718
cacagagtcacagacaccatttattactgaactgcactttcaccttcacacaaactatttcaaagagctggaaaaagtgtagggtgaggggaggagagggacaggtgcctctcagaagccacgaccctcagtgggcttccccaggcagggcagggacggagcgtcaggctgtcagtctctgggcaccagctctccacgggcacgcgcacagcaagccagcagctcctcatacataaatacagacacgcttaacaaaaatagtatatcatcttcacaaggaactaatgactagtctcacatatgtacagcagagatcccggggt

SEQ ID NO: 565 - DNA, 641 bp, Rattus norvegicus
  Genbank Accession No. AI175551
atctttcaagcttttatttaagtgcacagacttaaggatgatttagattttgttaaaagcagccacatccatggactgtacatagtcctcaaaagcagtaatctgctcttccagcatatctgttccaaccttatcatcttcaactacacactgtatttgaagctttttaattccgtatcccactggaaccaatttagaggagccccacaccaagccgtccgcttgaatgcttcggacacactcctcaagtttcgtcatgtctgtctcatcgtcccaaggcttcacatctaacaagatggaagacttcgcaacaactgcaggctttttagctttctttgactcatactgagcaaggcgttcttctcgtagcctctttgcgtcttcactttcctcctcatcatcagatccgaagagatcaatgtcatcatcgtctttagcatctgctgctccacttcctgtggtatctgccacactgacagggccatacttgcccaaagatttcttcactcccggcaagctggccttttctttttcgtaagatttgatatgattataccaacgcagagcatgacacaggtcagcgggtggtggaccagagattgcttcaaatactgccacatcggcttgtgatggcacgtacc

SEQ ID NO: 566 - DNA, 513 bp, Rattus norvegicus
  Genbank Accession No. AI058330
tttttttttttttttttgtgaatttgtctagttttgaaatattttcaagagacttatatgcattgaaaagaccattccagacaacctcctttcttcttgctttgttatcatttctagcacaccttcaagacgatgacagcatacagaaccaacaacactattaaatttattgtatccattcttcctggacattctaacaaactagaagtattctcagtggttgtatatactttcttcttaactcttcgttggctacgtcaactagccagtgagtaagagcatcacatgcaaaattgtcatggttattaaacatgtatgtccatatataaaatggtcaccacctgaattagactctcctctgtctttagatgttctcgttggatgacgtaccgttgtcttggaaacaggtacatgctgtgttgctgtaatatgagcagaagtaaatatttgtgttacagtatggagacccttggtcattgagaagtgtgaaatggtgggcctttgtgttgctgg

SEQ ID NO: 567 - DNA, 568 bp, Rattus norvegicus
  Genbank Accession No. AI177119
agtgatctatttatttttctctcttcccacctgaaaaaaaaatagtctcataaaggtctcgataaactgccactggaatggaaccagtcagtgattcccagagaaactttgaggagacagagggctgatgggtcaggaaccagggtggacttcctgaaggaagaggtctgagtgaggatggggaaagcagagggagcgaggcgggcgtccgggtgctggacccagcctgccattctagtcaggaaacagtaggaaaccagagaagacgctgtcagagccctcagtgcccaccatgccgttgtagtcgttgacggccagccacaccttgtcgcccctctgcagccgcaggagtactcctcctgagctgacctgcttgctgttggacatgtggtcgcaaaagctggtcaccttggcattgttgaggagcaactgcacgcacaggttggccgtctgggatgtgtggtggaccaagtagtagaggccgggcactttgcaggtgaacttccccgtgtttgtgttgtaatccccctgaggattggtgatggcggaattgaacttgacaaggcca

SEQ ID NO: 568 - DNA, 468 bp, Rattus norvegicus
  Genbank Accession No. AI072658
  misc_feature (1)..(468): n = a or c or g or t
tttttttttttttttttgaagcttttaaacccttttattttttattttttttaaataaatgacaaaacttttgattgattcctaaccgcccagctccctcatcagacatttgggggctggagtttggcactgcaggagtgtaggaaggaatggagccctagcagtatagcctgggattagtcctctccctcagagcataaggtggcctgtgtcaggaaagactggactaatgtttatgtgccacacaccaaggcaaacctcctggccaataatgtgtccaagctggatgcccaccttacggatgagggagggtggccggcttccaggagctttgggcctggacccatagacccattgccaacaagagtcatgtgcaggattagaacccagagctttatangggtagctacgtcncggaccccagagactatacacagggctttttagtgttgggtttctgttctctct

SEQ ID NO: 569 - DNA, 441 bp, Rattus norvegicus
  Genbank Accession No. AI043958
tttttttttttttttttacacaaaaaggaaaggatttttttattgtctcgttgtcgctatccctggatgaaccaagtggcgcagtgcgggactgttcacagtgtaacaaagaccagccagccttgctgtcatttaggccaaccacccctttatcgccttgcagaaggagataccaccagttcagggatctgcagttggtctctccccggtggacctggttaatcagctcttctgagggaactgtgtctagtttgaggcaaaacacaggatcaaattagcgttcctaatcttgtttgggcctcctcccgggggcatttgggcttgtaacacattccgggaagaagccaaggcgccgctgtaacaaccacagctgccgcgggacgggcctgggtggtcaccgcctgcagggttggggaaggatactggccgtggggtttcctc

SEQ ID NO: 570 - DNA, 567 bp, Rattus norvegicus
  Genbank Accession No. AI179464
aaagaattaacttttatttttgcttagttttattaaaaaaataaatatgtcataaagcttttgtttcctttagggagaaaaaaaggaacaagttccataaaatcaaacaagcaatggtaacatgtctaacttgaaaacgattggggatcactggtttacaagttataactgaatgaatgattgctacagttgcccatttcctcctgccaatggcagcaaacaacaggatcaactggagcaaaataaataactgtgtggaagccctgataagtgcttaaacagaccgattcactgagacatctgtacagctatatcttgctttaaataacaaagaagttcctgtaaagtttgggtaaatgagataaccacaaacatacaaggagagcttggtatctgaaggacttctgtggtttattttatcaacaaccacttttcactttactcaggcttttgctttgcttagaagtacttactactgctctgaattgaggcaacagaacattcacccaacagtgcttttgctgggccagtggcacaatttccaagtctgtgtttctattaaagtaa

SEQ ID NO: 571 - DNA, 329 bp, Rattus norvegicus
  Genbank Accession No. AA997466
  misc_feature (1)..(329): n = a or c or g or t
tttttttttttttttttacaaactcggccacactcgccggctgtacatttaatcagtgcacattatttacagaactaaacgatgcggggagggggtggatggccccacccctcgctggctctcaggttctgtagaggtgatacctaaagggtgctgctggcacacccctcccatctgtcacctctagtgccaggctctaagaatccaccacttgcagagaggcggtgacccagaggaccctgggtggccgccctcaaggtttangaggcagaagagccagagccagctgttacagtaccatttcccacagaagcctcctgctgactcca

SEQ ID NO: 572 - DNA, 455 bp, Rattus norvegicus
  Genbank Accession No. AA859688
  misc_feature (1)..(455): n = a or c or g or t
tttttttttttttttttgggatacagaaatagttttattttcttaatgcagcacagtagacatacaatcgattattccctagagtgtgcaatataaattattcacattaaaaaattaacgacaaagcctgatatgcgggaaatattaaaaacatacacctaatttttatgtgttctgactgcggacatggctagctttataaatctgaataaataggacatggcgcacagtggcttgagtatagacgggcctgctccaggtgtagtgagaacccactctccactttggtcatcgagattccccgtggcagcgtggggcggctctgaaacacttctggcactccagggagggcgtctcgggcgctccccctactctcccttgtancgagggggtcttttctccttgaaagcaagaagaccttccagtctgtccttcgttgagatggtctgagcata

SEQ ID NO: 573 - DNA, 574 bp, Rattus norvegicus
  Genbank Accession No. AI012221
actgaaatacgttgtcttacccaacccacccaaaaataaaaatcttacccttgtcctctaatctttcccttatccccagtcccatccccggccctgcacaagtgccccggatttcctgcccattggctatatcggagtgtgtccattatgtagcaacgtggaagcctctgtggagagcacagagtgggtgaaggacccttaaaaaggtgctcatttgagagccctggccacttgctcataggccagctctatctcttcatcgtcaggacaggtggaggcgaattcttcccgagcgtaagcgttgctcaagtaccgatgcactccacggaacgcctccgggatggtgaatcctctgtactttttgcacaccacctggactatgtgaagctttggcagcaggttgcagtcagccagggtgagctcattgccatccagaaacttcctctgagagatgccctcatcctcggcgctggtttcatccacttcttccgggaggggggatgtcaagtaattgtctagaaccttcagggctttcaggagtcccttctctaggttgtcattgagggccgggttt

SEQ ID NO: 574 - DNA, 470 bp, Rattus norvegicus
  Genbank Accession No. AA850524
agccgcgtcccgcgccgccgcaggtgaccactcgccgcgccgccggaggcttcacccgcgtcctccctcaggacgcgcccgcggagctcgggcgccttctccccggacccggaggccgcgctgcgcggggcggcggcgaggccggaagatggcctgggtgctcagtatggacgaggtgatcgagtccgggctggtgcacgacttcgactccagcctgtccggcatcggacaagagctgggcgctggcgcctacagcatgagtgatgtgttggcgctacccattttcaaacaagaagactccagcctttctttggaggctgaggccaagcaccccccattccagtacgtaatgtgtgctgcaacctcaccagccgtgaagctgcatgatgagacgctcacttacttgaaccaaggccagtcttatgaaattcggatgctggataatcgcaaaatgggagatgtggctgaga

SEQ ID NO: 575 - DNA, 636 bp, Rattus norvegicus
  Genbank Accession No. AI012356
ggatgttaaagtagttacagcaatatacaaaaacaaacaacaacataaaacaacccacaataatataaatttttacactagaaagtatacattggaatttgagtgcagtgaccaggacagaataaaagccactgtactgggaggccaagcaaactgcaggcatggctgggtgaggttggggacaagtggggccaaggggaggggaagtgggccgttccaagggctcactatgggtgattaacccagatacagacttcccagaacccctgaggtacaacacctgccccagagaagccctcaccttgttcctgggtccccaggattggaagccatcaacatgcccacgccttgccttcctaaataccctttcagtttatgagttcagcttattgtgtaactaaagaacctggccagggaagggagagcaatgactgcctcgaagcagaaggctggggtggtcaaggcaagcagtttgtcttggagacaatgtcctcactgcccttaattcagacactggttaactggagaaaaacaattccacagacagatcagctgagtaaggtggctttgagtcactgaatctagccatgcccctgtatcaagggaggcttgccttgaaccactcagtgttcaagt

SEQ ID NO: 576 - DNA, 345 bp, Rattus norvegicus
  Genbank Accession No. AA963703
  misc_feature (1)..(345): n = a or c or g or t
tttttttttttttttttggattttgactcctgattttattattcaatttctttttctactaaaagtagtcttcggtggttgggaagcctggcctcccaacaccagagtcagtcggagctggtttttttgttgaaaggagtgggcgggtgggtgggggaccgggatgagggcagaaccccgctctgctggtagtcttgggtggagaagacgaactgcacttgacagagcctggggtgcggtgggagggggtgaggcangagtgacaagctggggaggggacccacctcagtcnccagctccattctcctctaatgtctctccactggtggcgttctctgcagtctt

SEQ ID NO: 577 - DNA, 503 bp, Rattus norvegicus
  Genbank Accession No. AA866234
ttttttttttttttattcacggaacagttttatttgccaacctctcttggcgggccactcactccttgtgagcaggattagaaatgtccataggtgtactctggttggatgcagcttgtgtccacaagtgggaatgctgaccagggcagctttaagctcaacaacctgagcagaagtccagactcagctccatttgatgttcttgtcctcctcggtcatggctggtacatcagtgacaaggcctgtgccaatggtcttgttgccatccctcaaagtgaaacgttggcctttctctaagatcatgggctgccgcaagattaggctaagcttcaagtcctctccaggcatggcaagttccttccctggaggcaagatgactcgacaggccatgtcccaggtcagggagaacatgacgggcatgaaatgagatacaaagggtttgtggcggccaccctcctccttgctgaggatataaacctgggcctccaccttctggtggggtt

SEQ ID NO: 578 - DNA, 587 bp, Rattus norvegicus
  Genbank Accession No. AI009167
cagcgaaatggattcttttaatcactgaagacagtacaaactgatacaacttataaaaatttagaaatatgtttctaggccatgaaaatgtctatatcctttggcccgatgaacccattcatggaattttaaacaaagaagaccaagaacagtaaagctcaaccgacataggtatgttgtagtcatagcgacagatcgaaaccaccagctgtccagagaagtggtcgggtgagtgctcctgccacacatgtgggctcaaggcagtcagcactggagggatgccgggcagggtacagggtgggggcggagcttcacagtggtaaaacgaaggcgggctcctcgcatgttgtcatgcttccacacacagctagaaatacatgttacaagatgcatagagaaacagatgcccaaaacgtggagaacatgcagggtgaagttctgatgcgtttatccttctaggcacactgtgtggcgtaactgcacccctccagggactgggtgctgtcctcacactgtggggtgagttcactgccccagggactgggtgctctgttcgcactggtgtgagtgcagtgctccagcgttgg

SEQ ID NO: 579 - DNA, 596 bp, Rattus norvegicus
  Genbank Accession No. AA851926
ttcagtcttcaaatatcttttattggaaggccatgcattgccttcatttattgtatttgaaatcactgtacagttacttttgtgaaaacactgcctgcattttctagtacaaaaaaaacctaaaaattgtttcaggaatgtagagaaatatccaacttaaatagcgaaaaaagtgcaccataattactgctgcactgcagtcatttctgcatttcccatgtttcttaaataactatcttgtctgataacacacaatataaagagcaattatgaaaaacagacatttacatatacttctaaagtcttattgagaataccctgttggcattggatagccaatcataggcgcagcagctgcggtagcaggatatgcatatgcctgttggttcatcccattgtgcatatttgcaacattacttccatattgctgagtgctatcataaccgttctggtaagtccctgttgggttaccagtcctaaaactggtctgtatgccagcagatacaaaattacttccaaagctcccattggtgtaatttgcagcactgtaaacaccattctgagttttagccccaaaatctctcttaagcagacta

SEQ ID NO: 580 - DNA, 556 bp, Rattus norvegicus
  Genbank Accession No. AA943537
ggaaaatgaggttttataatcttagctgtggccacaacctagcagcacagagcaaggtgggtgtccaggctgctggagccacgttcccagagggttggggcttccaccctcagcaagcacgttgcataggctgctcaggccagccaagggcattggtgcagcagtgaaagcagcagcactaaatgtgacccttgggttgggggcctcaggatgataggtgatccctgcagaagaggcaagggttggtgcccagggctgggcctcagcaccaggacggggcctcagtacttctaggccatgctggggccctgggtcagggcacttgagacacaagggagggatttggaatgcagggagggtggaggcaaggactggcctctgtgggtggtccacggtggcggatggccctgtggtgtggaaggaggtccatcttcaactcaggtctgggctctagcagcgtggcacttccgacaaaggacatggccatccagagggaaacagccgttgtcatctgcctcaatggacagggcattcccacagtcctcctcgtgccgaa

SEQ ID NO: 581 - DNA, 496 bp, Rattus norvegicus
  Genbank Accession No. AA957653
tttttttttttttttttaagcctttttcgtctttattttagcaatggattatggaaaacgtgcagattcatctagacatgaaaatatttcagtgcacggtgatcttgcctgacgggtttagtactgctaagggaactcaaatataattctccatcctgtggtaaaggtcagaataaaagcagcacactgagggaacagctgatcgccagagtcactgtgtctgaaggcttccagaggttggcggttttccctcctgactgtgtatccattttcttcttacagcttaaaaattttgggggttgttaacagttgtttgtaggaatttttgtttttctccagattcaagtcctgtccctccttagtttgcttctttatgcagtattcgacttgctcagttcctgcctgattgcatcaatgagctcctccttcagctttgcaagttcttttctcatttcatctaaaatgtcctgcttcagcctgtcatagtcaagccctt

SEQ ID NO: 582 - DNA, 450 bp, Rattus norvegicus
  Genbank Accession No. AA859805
tttttttttttttttttgactagaaaacccttgttttattaagcacccgggcaatcttgctgtgtgggatggccaaaacatcaaaattaaaaccaacaacagacaaaatggtgttgtagaggagacttaggtacaaaacggggtctggcatccagaatccctgtgggtttggtccatgttcactccctgaggccggcagggagggatgccccagcggccagctgccctcgccctccggctaggcggctatgcttcttgggggaggctgcctggaagcaggtcctgcttttcaaggggagacaaggggggctccgtccactgagatcaggactggacgattttgcagtttgttgtagagacgaagcgacctgtgtagtggatgttgcatctcaccacgttgttggtgaagtcagactccagaacaatgtacttggggttcacgtgcacctt

SEQ ID NO: 583 - DNA, 571 bp, Rattus norvegicus
  Genbank Accession No. AA964755
tttttttttttttttttaaatataaacttccatatgatttattgttgttccttgtacacaagaaacagtaatatacaagttacactgctttagaatgtaaaatggataaaatgtgtacaaaaaagcacgttcctagaacacagggcattggcaaatagtcaaacctgggaagtaaaaagcaaaaccaaaaacaaaaccaaagaaacaaactaaaacaaaacaagaaaaaccaacatttcttcaattcagtgtgcaacatataaaaaacagaaatactaactctacaggcagtatttcctgataaattatttaaatagcatatctacatagtctgagatctctattccaatggcaatgagaaaataatttataaaaataaaagcaatggtgtacaagatgatagaacaaaaccagaactttgaggagttgtatttaacatttcaaagctatttctgtattgggatcattctctgcaaaggatttttatgctatgtacaacactgactttttagacacgacagtagttttaagtttattgacacttaaactctttcttcttgattcaaaatcc

SEQ ID NO: 584 - DNA, 349 bp, Rattus norvegicus
  Genbank Accession No. AI234748
cacataatcacttccctaatatacatacaacagaacacatttgtaatatttaacctgtcaaaccttgcctgggacaaacaagattctcagcatcgtttattattttacatatggataaatacagttctcaataattgccatgaatcaggactgttgaaaaagaaactgagtacattccgtctggggttatgtgtacttgtttatcttaacacggtcttctaactgttgatttacaagtgagtgtataactcatctctgggaggtcctgaaaagaccctgagcagcttacgtggttatttctagagctcttgaaatctgcagagttgacatgagacctaccaccaccagc

SEQ ID NO: 585 - DNA, 417 bp, Rattus norvegicus
  Genbank Accession No. AI175990
tgtgaggtgagggcctgtcactagtttcctgttggtgacaaggtccactccagcagctctcagcggtgacgacttatgcgcaaggtggtcagatgccacaacctcccaactgtggtgctaggtgcccatagccttgggtcttggtgcatgagccaccaagtctgtcctgagtgccaccacagcccttcccaccagacataccaccttgcacttcgggtcttctactctaccaacacacacaagagacaaaatggtcatccatcacttaccctattatctaccctcaaactacattctgcctctggttctcatcctctctcggaggttgggggggggggcaagagggtcatgttcttagaaactcgtaatgtgtcctacgttgaatgggtttggcatttgggacgcaagctgccattg

SEQ ID NO: 586 - DNA, 398 bp, Rattus norvegicus
  Genbank Accession No. AI171844
gccgagagtgaaccgtgttaatttattggcatagtcaattcatcaacaagatgggtgtctgtctccaggaggtacggctgacctccatctgccggaacaggtgcccacatgcttcacctggaagactccgcacgtcaggcttcagtcaggctcggctactccttctttattttcactgtttttatgctggtgcccgaagtcttctcagcgttcgctttgaactcagtcttcagggcatccctaactggttttgcacagatctgggagaaccggatgtagctgagtccagcctgtcgccagtacgccaccatggtgtctcgagcggggcgtgtcaggcagaaccgctgggtcgcttcagagtagcctgagcccggaccggcagcaggaagccttgtgcc

SEQ ID NO: 587 - DNA, 536 bp, Rattus norvegicus
  Genbank Accession No. AI230440
gtccatttatttagaaaaaaattaacatgagcaaatgagatacctcagtgttacaacagagtatagaaatgtctagcaataatcaaataatttgatctttaaatacaaaataaccacatgaacacctaatatacaggtttcatctgaatacatatttattagataaatattagaggtcacatcatctaactacatacagctttgcaagactagaaatcacaattagttttttttttctgaccagtcaaaagtatgaaatgattgccatgtacatacgctgtacaaagacgatgggttccatggacatcacttcaggctgcacgtgtgggtgtggatgtgtatgcgtgtgaatcacctgtgatcatgatatcaaaaacttatacaaagcatatgaatttggttacaattttcttctgaaacccccgtttctcttcattgtttccatagcaccccaaaaatacacaggtggcagggctaggacacggaaggtaaatagtacgtgtaggtagaaataaagacaaaggggaacgaaaatg

SEQ ID NO: 588 - DNA, 610 bp, Rattus norvegicus
  Genbank Accession No. M11851
ctccttgaattcttcagaggcagcagccagcctcagacaccatgtcaccaaagaaagccaagaagaggttagagggcggaagctccaacgtgttctccatgtttgagcagacccagatccaggagttcaaggaggccttcacaatcatggaccagaacagagccggcttcattgacaagaatgacctaagggacacgtttgctgccctcggacgagtgaacgtgaaaaacgaagagatcgatgagatgatcaaagaggctccaggtccaattaacttcactgtgttcctcaccatgtttagggagaaacttaaaggagctggcccggaggagacccttctcaacgccttcaaggtgtttgccccaaggcgaaggattactggagccgactgtgtccaagagatgctaaccacgcaagcagagaggttctccaaagaagagaccgaccagatgttcgcagcttttccccctaacgtcaccggcaaccttgattataagaatttggttcacatcatcacccacggagaagagaaggactgagccctgaaccgcggcctcgggtgacctatagcctgttctccatccccaggccctgctgtcccacctgcggg

SEQ ID NO: 589 - DNA, 504 bp, Rattus norvegicus
  Genbank Accession No. AA850290
cagtgaacatcatttattaaataatttatttaaaaaaaaatctcaaggaagcagaaggcagcttcatttagacacatagttttgtaacagttccagaaatcagtctatgggaaaagaccatttgacaatgataccaggaaggtacagaaagtaacttggacggtacacagcgggtaacagttaggccctgagaaaaagtttataagactttgacgtagacactgacctttagcatagaggttcatgaagagaattctagacaacagggaggtggcagctgtcaggtggataaggaagctttgaaaaacttcaacaagagtgcatgacttcacagtagcaaactgactctactcgtgtaaactagcttctagacactaaatgaagccagcattctgtcacagcagaaacttgctatagacatctctacccttcaatatgtttatttttctaagagcctcagagattcccactgaggataacctctatcaatttccagccatatct

SEQ ID NO: 590 - DNA, 355 bp, Rattus norvegicus
  Genbank Accession No. AA924405
tttttttttttttttctggttttgcgtttttattggggtttatcatgggcaggaggaactgccaccataaagtatgcccctcccaccaagcaggtccattctaatcctcctcccgggccttctgcgactttttctttttctttgtgctgctctttgtgcagcttgcagcagcctcaggctcctcagaaaatttccttttcttcttaggggtgatggggcttgctgcctcttcaggttcactggccacttcctctttaggtaaggacttctttttcttaggaacacttatgctgctagtagccatctcttcaagatcactggccaactcctccttgggaaaagctttctttttcct

SEQ ID NO: 591 - DNA, 534 bp, Rattus norvegicus
  Genbank Accession No. AA900863
tttttttttttttttttgcctcaaaaagtgacatttattcaaagagagagagagagagaaaaaaaaaacaaaacaaaaaaacaaaaacaagatgtccatcccttggctcccttccctcccccctccagctgttcctcagccctgcccccaggactgaaccctgggctagggccaggtagcaggacagcccctcaaatgaggtcagcaacgttgaggggcatctcttcaatggaggtgttgtagaaagtctcaatgtctcgaagagtcctcttgtcttcttctgtcaccatgttaatagccacacctttccggccaaaccgaccacctcgaccaattctgtggatgtagttttccctgttggtgggaaggtcataattgatgactagggagacctgctgcacatcaatgcctctggccaacaggtcagtggtaattaatactctgctatagccagaccggaactccctcatgatcacgtctcgttccttttggtccatatctccatgcatggcagaaactgttaaatcccgggca

SEQ ID NO: 592 - DNA, 604 bp, Rattus norvegicus
  Genbank Accession No. AI170363
cttagtgattctttatttataaggtaggcagaagcaactgttacaatgtagaagggagacacattacacgctgttatctatacaagtttcaaacaaaaactgcacagggagaggtcaactctcaatacaaactagcaactaaaccacaataatttacctttagaaagggtttgttttcagctgtgacactgcttttacaatgtgcaaaaacacaaacagaactacccaaggtgtttgtcacattctttctacattgaatttggcaacagtttatattaactttattcagattatactaacgtttaaaaactaaacaagtgagaagctgtaccaaggtacagttacatccattcctttcaaaggtttaaaataccacttgtctctattagaatgacctcgcagcgatttctgcatctgcaaaaaccatctcaagcatcatatgcacaatgcatcagctactttgagtcatcaaggttggtgggctaaaccacaggcactactgtttgcttatagtctgtaaaaggagcttgtttttcaaagaaaagagcttaagtcatttctaataatcatgcctttgctttaaagccataacacctcgtgccga

SEQ ID NO: 593 - DNA, 163 bp, Rattus norvegicus
  Genbank Accession No. AA955123
ttttttttttattttttcgcaacacaggtattttattgaatcgactatgaacacccaagtgggtataaaatttgcatatgtgtggggtaaataggaaggactaagactagagtttggggcaaactggtaggcgccagaatctgttatctaccgtcaggtgctg

SEQ ID NO: 594 - DNA, 599 bp, Rattus norvegicus
  Genbank Accession No. AI176810
tttttttttttccaattacagaacatagctttatttatagaatcttacaaataaacatttacagttcacatgacataagttattttgttttctaattcttctaatgacacctgagttatttaaaaatatactgtgatggaactgtaaagggaactctgactaaaatcctttctttttgcaaaactcaccctgcttatctgcatgtctttggaagaagggttgctaaaactggatcctaggtggtccaggcagagagaagtcctttaaaacccagatgaaaggtactggagaatgctcccccagctgacactaaatactggagggcagccatggaggactgaaggtgaggtcagagatgaggtgcttagtgacagaacccaaggcctggctaagggctcctccatgtgacaagcgctttccttgctagtgttaacaggggacagaagctaagggcactaaggccagaggagaaatgtctgctaagcaactcactgcccctgagacctctaatatgtacagatgcttaaaacagcaagtccgacatttaaaagtcaaaaaaaggtcaatggctgcatttccgactcatgggcgaatctgtc

SEQ ID NO: 595 - DNA, 379 bp, Rattus norvegicus
  Genbank Accession No. AA956476
tttttttttttttttttgtggggtggggggtgggaagggcaaggcagtcattaaagacaatacctctcaaaggggcgagggtacagtgagaacacatgcagcacacgtgatcctcactgacagacaggggcagagacctctccagaggtcctgtgataaaacaaaaaggcctggcctccatctcccagggtgatgcccgaatcctttgtggaaaagacagctctcacatcagaacccgaagaacctccccctctagggtcccaaatttacttggtgacccagcctagcctggtgacacatttgcatagttaccttatgactagattagagagagagagagagagagacagagacaccatgcttctgaaagtgaccctca

SEQ ID NO: 596 - DNA, 683 bp, Rattus norvegicus
  Genbank Accession No. AI009768
aaaatatgccctcattttaatattcttcagagccaagtcacaaaaggtgcttttcctgtttaattttctttttaaaatgaatacctgtatgggtagtaattggacagttgtagcactttatgcaattactaactcatcccattctcactacctcacaggacctctctgctttcatcccaaagatgaggaagctgaggcatgagacagtcacgtaaggatgagcagaagagtagcactcagtgtttcctcattaactctggcaaggtgcagaggtcatacagtgcctgtggtatacagacgtgggatcagaatgcagatgaggcttgttctgtgtttccacgatggctgggaaatctcttggattgggagacaggggccaggagcctgaatttttcttttctttagtgctagagtcaaatgtagggcttgtgcatgctagtcaagtgcttgactactgagagacacaatcccaggaccagtattcccagccagcaagattggctccttccctcttccaaggatgaacagccaaggatggtggacaagaactcagctcttggtcagctgggcagggtcagaattcttgtcctgcttactggctttgtaactgtgggcaggttactttgctccttcaagcccattttcccctctgtaaaattggggaacaggggaggaccaatggg

SEQ ID NO: 597 - DNA, 597 bp, Rattus norvegicus
  Genbank Accession No. AI237698
gagattcctcttttttccttttttattcaacaacacttctcatttttttcaagacatacatttggctcctgccatttctgtttttcattcggtcctaacatgattagggatgtaacatgactgcataatacaaacaaggaacagatgttctgttaaaaaagactgctgtgaactattcttaagactttaaaaggtcttcatgactttacagacatcttcacacaccttttggtcctcacaacaaccctgtgaggtaggaattaacatgatcattagcagagcataaaataggaaaatgagatatacccaggcatacaattagtaatctgctactatcttagtgttgtggaccttagggtttgtgttaaagcacaaagcatgaagtcctgtaaaatatgctctgtttattcccagagaggtaacaacatgggatattgaatctttattattactgcattttattatcattctcttgttatgaattttcttctttattataacttatacaaaatatctccatttctactgcaatatttatttcccagtatatatacttaaaatataaaaggtaagcaaatacaaatagctttctagaaa

SEQ ID NO: 598 - DNA, 344 bp, Rattus norvegicus
  Genbank Accession No. AA899797
tttttttttttttttttagaatggaaaaagagataaattcatctttatttgaagataacatgatctaaagaatctgtttttaagaagctgagaaggtaatgaatagatctgactactgcagggcataagccatactcaaaaaattaactggggttggggatttagctcagtggtagagcgcttgcctagcaaacgcaaggctctgggttcggtccccagctccgaaaaagaaaaaaaaaaaggaaaaggaaaaaaattaactatattcttatatgttagcacttgaaaactcaacatagccaggcactgtggctcacgtctagaataatagcactaagaaagct

SEQ ID NO: 599 - DNA, 508 bp, Rattus norvegicus
  Genbank Accession No. X14671
tccttttgcggccatcgctggattgcagccgccaaaatgaagttcaatcccttcgtgacttctgaccgaagcaagaaccgcaaacggcatttcaatgcaccatctcacattcggaggaagatcatgtcttctccgctttccaaagaactgagacagaagtataatgttcggtctatgcccattcgaaaggacgacgaagttcaggttgttcgaggacactacaaaggccagcagattggcaaagtggtccaagtgtacaggaagaaatacgtcatctacattgagcgagtccagcgagagaaggctaacggcacaactgtccatgtgggcatccgccccagcaaggtggttatcaccaggctaaagctggacaaggaccgcaagaagatcctggagaggaaagccaagtcccggcaagtaggaaaggagaagggcaaatacaaggaagaaactatcgagaagatgcaggagtagaaaaataatgcccagttttcattaaataaagctt

SEQ ID NO: 600 - DNA, 454 bp, Rattus norvegicus
  Genbank Accession No. AI231421
gaaattcaaagaaatctttttaatttttgaccattggtaaaactttaccagaaaacaggatgtactttaaaaacttgaatcaatgaaaacatgaatgaaatatgaaattaagactcattctggtggcccagtaagaaaagacagaagcccattatcaagacgaaagaaccggtggacccgagtctctgagaacagcgagtacactgagttccaggacggcctccctccacacccgggagtaactgcgtactgagttagcaacccaaaattcatgttcgcctcccaactgcctcaccggacaaatttagagtcatgattctttttgacatttacagtttagacatataagctcatgttaaatgacaactggtctgtcaaaagtacaggagaagaaaaagcaactgtttaattaaaacctttctagatttttgtttttgattattgatcaagttgc

SEQ ID NO: 601 - DNA, 503 bp, Rattus norvegicus
  Genbank Accession No. AI102741
cttcttctcttagacacagtgtacacacgacagcctacacatggcacatgatttagcaaaataaaacattcacgatatgattgaaataacaaagtgtctcagctacataaatgactttaaattatacagtaagtgaacaggagaaagaaacaaagctatagcttattgaaagcgcaaaaacggctctccaatgatgtgactttacgaaagaccttccttgcccaggacttctcgccaagacctcaacagccacctggggccgtggttctgccaatggttttatcttcaggttaacttcaggtgcctcatacttaggcctcacctcaagtctgtccgggtaggagggaggctgatcacacagggactgagaatggccagagacttcttgggaaagaggctggggtgtacatacgggagagcattgagcagggtagatcaggagcgccatattaggagactctgaggttgaaagagacaacttccaacagtaagtcagaggttta

SEQ ID NO: 602 - DNA, 551 bp, Rattus norvegicus
  Genbank Accession No. AA851245
cgagaaaacacaaatacaaacttgtttttagaaaattttgtatacaaaaccaggagctagatgtgtagctggaaaagatacctcagctctgttccaggtctgtcaccaagtagggctgtgtttgcctcaaggcctcaaggaacaagttcttgcaggtcaggttccaggctggagcaaagctaaagagcttcctcatcttgttttggttggtggtctctgcacgaactgcctggtactgtccttcagtcagcacattgccatacagagcatccagcaaaccatcaacttctgtgaccctggcaatgagtgcttgcctgtgttggtccacaaaatgttctgttctggctgtgccctgagcagggacactggttgcagtagccacagctccagactcttccataatcttttgcagctgctcagccagctcctgtatgcccatgtctctaagcacagtcattgtgagctccaagccatacccctccagatagtaactgacgagtttatcagtgaggtctatggggtccatctgcagcagggccccccgtgggatg

SEQ ID NO: 603 - DNA, 547 bp, Rattus norvegicus
  Genbank Accession No. AI233740
aatgtaatgactctttattattttatctgcataccctcaaatgttaccagagctccgggtttttgacaaacatttgctcagatcaaattagtgtaggagatgtccattcacttctccaagtcacatctgctcgcaacggtctgttcctgattcagcatggggatttaaccacagccttgcccacaccatgatgccaggcaggctgggattgagaggactgcaggagtgaggtatgcatctgcaaaagagaagtctcgccggctggttcagctttcagtactctgcgtcatagggaaactcttccatgttgactgtctcaggcagcaggcaggccctccagtttctgttgaagctcaggatagtggccatctcctggtcgctcaactggaagtcaaagacctgaatgttctcctgtatacgtgctggcgtcacagacttggggatcactaccacgttcctctggatgtggaaccgaataagaacctgggctgtggttttcttgtgcttggcggcaatctctttaatcttggggtcctgtaatagtgaa

SEQ ID NO: 604 - DNA, 478 bp, Rattus norvegicus
  Genbank Accession No. AI172423
tcttaggtatgtgaacatttcgaccacaggcgtaccacgtgtatgcaatgcccgcagaggccagaagagggtggcagagttaaatggttatgagcagccatgcggctgtttgggaattgaaccagcgtcctctaaagaaacagcaagtactcttagctatggcaccgtctttccagcctaaaacagagatttagagaaaacagacaagtctacatccgtcagaaagtccgtatcaggactccatgtctaaggctctttctagaacacctcagtggttctgaaagcacacacatcattccccgacccacctcggggaccaggaagggcactcaatatgctgtccctctcttctgcaggtagtggccatggtaccttcccaagtggcgtattctttattggtgtttccaagggctagggttgtgacagtcaagatggttccagaggtggcagaggaaaagcttcttccacctttaaaaaa

SEQ ID NO: 605 - DNA, 495 bp, Rattus norvegicus
  Genbank Accession No. AA955540
tttttttttttttttttactagaaatcatccagtcatttatttttgtttataccagagatataatgaacatattaaaaagaaaaaatgtttttataccaacatgtttttattgtttgtttctagactcctccatttagaaaataggaaccacggtttcattaagctgtggctccttttcctttaacctaagcttagtttaaggaaaacttccctcgtacaattatgtaactaactttaatcaatacatagtaattatgcaagcctcaatacagtagctaactttttgaaaatgacttaacacaaactattaacaactaccttctttgaaaatttctctatgcaagtatcagaacagatttacttctcttttaattttcatttcctattttttgggtatgccttagaaaagtaaaattacatataaacattgtcaactactttatttgtaaagtcaagataatggattatctcctctaagtaattaaattttgcaa

SEQ ID NO: 606 - DNA, 603 bp, Rattus norvegicus
  Genbank Accession No. AI233714
actggaaacaactgttttataaatatgtggctgtatttttcttcacatccagcaaatgtattgaataggattcagatatattcttcccagactcacagagttccaagattttctaacacaaatttacatcagtaccaaaatgggcaagaaaatgaaggcacaggctcactctgtatcaataaaggaagtcaaacacagttgtgaggcactaatgacataagcatagaaggtcaatcaaaaataagcaagtagtcagagtcttcagggactttcctccctcttacatttggcaaaattcagtcttgatatttttaatacctcagagagaaaaaaataaataaataggagatggtgcattaaaaggtcaagttacctgtaattagtctttagaaataaaagagatgaaactgaaacacagacttctacagtcttagattacccttcctttgtaaggatcttgtgtgtctgtgtagaaatgccagctataactgaagatctaagatatttgctgacatggtccctcagtccttctaaaagattgtttcacaaaaacaactatcttggtttccactgtaagtcaaatttgattatgtaaaagtgatc

SEQ ID NO: 607 - DNA, 497 bp, Rattus norvegicus
  Genbank Accession No. AA943367
tgggacgcactgctgcccagtcccgcgcacgggtctccgggcgccgtcgcggaacccgagacttgggacctggccccgaggaggggcccgtcgccggtcccgtcggtgcgcagcctgcggtccgaacctgccaaccctcgctcggggctgcccgcgctgctccacagctacccgttgaagggtcccgggctgccaccaccctggggtcctcggactcagactggacatgtgatcatcacggtgcaaccctctggttcctgcatcgagcactccaagtctctggacctgggcctgggggagcttctcctgggggccccagcagctcgggactgtgcccaccgaagctggacacggctggaccgacttagtttggggggctatgccaaattatgaggggacttgggggcccgtgtctgaggtgcaaggtttaacctgctgtgaggctatcagtgtggaccatgggaccgggacactagaagtccagtgcccatagctgc

SEQ ID NO: 608 - DNA, 556 bp, Rattus norvegicus
  Genbank Accession No. AI176362
tttttttttttgttgtaggaaaaacatttattgcaattcagtgtcaaaaatgtttacaaaaatatgccaccgtcttatacaaacaactataaaaatgtcagttcctcatgcaagaaaggtgtgcaaataagttatacaggattcagattactctttattaaacaatcatctttgcatgtaatctgtccaaccttttgcatttagttaaaatgttcaacccactccaatagatttctttaaaacatacacttaaagctcctaagcttagacacagactataatatactctctttagccaatgtgattggcatttggtagtgtaaggaaggttccgaaagctcccaagtctgaagcagggcttggagccatgtgttaaacagccttgtgcatagctaataaacatcgtctatactaaaagacagagtcagactctgtaatgctgaagcaaatgacacatccagaaatttggagtttggatgtggccatccattatttttcagccaaatggagagagactaagttcagagagctttctcaagaaggtttgcttgatgga

SEQ ID NO: 609 - DNA, 525 bp, Rattus norvegicus
  Genbank Accession No. AA818089
ttttttttttttttttgattgtaaatttgttcagaattccttcaactttaattgtgggggtaaaatcaagcagccactgaggaaaaatagtccctggaagcagtcgaaacgtttgtgtagtggacacgatgagttatttattagcacaggttgtcacaagtcgccagctgttctcattcttccactgtctccttcttgccagtctcttgcccttcaaagagggggtacctggcctccacatcagcccaagtgatgttgccattggccagatcacggaccacactgggcagttcagagacctctgcccttatctgtctcatggagtctcggtccctcagagttgcagtgtggggggtcttgttcactgtatcaaagtcaatggtgatgccaaacgccacgccaatctcatcagttcttgcatatcgccttccaatagacccagaggaatcgtcaactttatgagacacgccatttcgagtcagagcttccgataattccttgacaaatggcataaactcttggttt

SEQ ID NO: 610 - DNA, 604 bp, Rattus norvegicus
  Genbank Accession No. AA859447
tttttttttttttttttcaatagaaaaaaataacttctttttatttacaaaaacaaaaatccaaatattggatgctgtaaacaaaattcacaatctgttccctctagcactgatacgaacatgtcagttttaaagagtccattttccgtcaactccttttaccgcctgtgacacacaattgtcaaaacattccaagagtgacccagggtgcagcttgctgtagtaggacaactcagagcaggcaatggttgtagggaggtgggagagagagtcaacagtaaacatagcctcttacattctgtgaagccttgcagcaagcattcccaagcccctcgccaccgcccactttgtaaggttatcacttttatctcagcaagtcattaccatgacaacacgtgacacggagatccctccacagcactgaaatggtgatgctaaaagaaattattaaagaaagagtatattcaaatagatgctatatatgaaaacaggatttttttttttggcttttttgttttgttttttatctaacacacatttttctttcacaacaaaagcttatttttggacagctgctgacagcttttaacataatacatttcat

SEQ ID NO: 611 - DNA, 5433 bp, Rattus norvegicus
  Genbank Accession No. AF090113
caggcagcaacagccggtggcacagcacagaagccgcctctgctgatagagaatggcccgcagcccgggtgagcctgctgtagccttctccctgactcagactccaccccatccctggctcagctgagtgtcagcggggccttctgcttcccctggaggcaggcaggacctgaccagactgtcctgggaagtgacgatgggccttactcaaaggggggaaaggacacagcggggactgatggggccctggtgtgccgccgccagagcattccagaggagttccggggcatcaccatggtggagctgatcaagcgtgagggcagcactctgggcctgactatctcaggagggactgacaaggacgggaagcccagagtctccaacctgagacccgggggccttgcagccaggagcgatctactgaatgtgggcgactatatccgctcagtgaatgggatccgtctgacccggctccgacatgacgagatcatcacattgctgaagaatgtgggcgagcgcgtggtgctggaggtggagtatgagctgcccccgcccgctcccgaaaacaacccgaggatcatttccaagacggtggacgtctccctctacaaggaaggcaacagttttggctttgtcctcagaggaggtgcccatgaggacctgcacaaatcccgcccattggtcctgacttacgtgcggcctggtggcccagcagacagggagggttccttaaaggtgggcgacaggctgctcagcatagatgggatcccactgcacggggccagccatgctaccgcaatagccaccctgcagcagtgcagccatgaggccctcttccaggtggagtacgatgtggccaccccagacacggtggccaatgcttcaggccctttggtggtagaaatagccaagaccccaggatctgccctggggatctctctcaccactggctcccaccggaacaaaccagctatcactatcgaccgcatcaagccggctagcgtggtggacaggagtggtgccctgcatgctggagaccacatcctggccatcgatggcaccagcacagaacactgctctctggtcgaggccacgaagctcttggccagtgtgaccgagaaagttcgactggagatcttgcctgcaccccagagtcggcggcccctgaagcccccagaggcagtgagaatacagaggagtgagcaactgcaccactgggacccctgtgttccctcttgccatagcccaaggccaagccactgcagggcacccacctgggcacctggaggccaggaccagagccgatccgtgtcctcgactcccttctcctcgccaactatgaaccctgcctttccctgtgccaacgccagcaccctgcccagaggacccatgagccccagaacaacagcggggaggagaaggcagcgaaggaaagaacacaggagctctttgtcactggcctccagcacggtagggcccggtgggcagatcgttcacacggagacgacggaggtagtgctctgtggagaccccctcagtggcttcggcctccagctgcaggggggcatttttgctaccgagaccctgtcctccccacccttggtgcgatttattgaacctgacagccctgctgagaggtgtggtctgctgcaggtgggggaccgcgtcctagccataaatggcattgctactgaggatgggaccatggaggaagccaaccagctgttgcgggatgctgcactggcccgcaaagttgttttggagatcgagtttgatgtggcggagtctgtcatcccaagcagtgggaccttccacgtgaagttacccaaaaggcgtggtgtggagctgggcatcaccattagctcggccagcagaaagcgaggggaacccctgatcatctctgacatcaagaaaggcagcgtggcgcacaggactggcaccctcgagccgggcgacaagctgctggccattgacaatattcgcctggaccattgccccatggagtatgctgtgcaaatcctgcgccaatgtgaggacctggtgaagctgaagatccggaaggacgaggacaactcagatgagcaggagagctcgggcgcagtcagctacacagtggaactgaagcgctatggcggacccctgggtatcaccatctccggtacagaggaaccttttgaccccatcatcatctctggtctcaccaagcggggtctggctgaaaggactggagccatccatgttggggaccgcatactggccatcaacagcgtgagcctcaagggccggcccctgagtgaggccattcaccttctgcaggtggcaggggagactgtcacactgaagatcaagaagcagctggaccgtccccttctcccccgccagtcaggcagcctcagtgaggccagtgatgtggatgaggacccccctgaggccctcaagggaggcttgctgacaacccacttctcacctgctgtacccagcgtggacagtgctgtggagtcctggggcagctctgccacagagggtggctttgggggctcaggctcctacactccgcaggtggcagtccggagtgtgactcctcaggagtggcgttccagcagactgaagagtagccccccaccccttgagccccggaggacgagctacacaccgggccccactgacgaaagcttcccagaggaggaagagggggactgggagccaccaatgaggcatcctgtgtcaccgctctccaccccgtctcatctgcccctgttctaattggctaccaacagtcttggtcgcccctaactgcgtcttccccaccccattctgtgtcaccaaccactgcccagcactgggccctgggcaacgaagactcctcaggcccagcccacccaccctcccacctgccaggagttgacgctgtggttcctgttgcagcccagcccctggccccgcccgagaggagggcttctggagagtgcttggagaggcccttgaagacctggagtcctgtggtcagtctgaactgctaagggagctggaggcttccatcatgacaggcactgtacagtcggtagctgtggatggcaggcctggctctcggccctggcgccggagccgggaagtcggaacatccccggaagacctgcaggagctgctgttgccaacgcccctggagatgcacagggtgaccctgcacaaagacccggtgaggaacgactttggtttcagtgtctcagatggcctcctggagaagggtgtctatgtccacatgtgcgcattgatgggccagctcagcacggaggcctgcagccctttgaccgtctcctgcaggtcaaccatgttcgcactgggacttcgattgctgtctggccgttccactactggcagaggtggggacatccttgagctggtggtcagccgaaaccatctggcacagagccgcagacaccagagcaccgggccccagtagtccccagatgatctgaggtcattatgtaagtcagctggcggagtgcccccagtcatcgattatggcctgcagattcacatccggtagagtggcatcttcaagttgggtcttcaggatgctcagagaaccccacaggaaaggggtcatccctgctgctcagctaggagagcccagctccctgtgcagtcatctcagagcagcgaacagagtggggacggcccactccgtgtggtaatggatgatgccagtatttcccattgggaagttaataagctgtaggtcgacaattctgctctgtggaaagaggcatttggcgacccagctgttcagatggtacccagtgcacagggaccctgccaccgggaaagatatggcacaagaacagtgtcctcccttctcccaaatggtggtgttttgagagcctccagcacctagtgaccatactgaggaaccccaattagggacaatctagggtgccagagaatgcttgccccttcctttgggttggtctttcaattatttcacgggtgattctgaacctcagagcagaactgtggccatcaaccctcctgtcccacaaaaccttagcccaagtccttgcccagaggagggcacagctcgggtcaaacggtccaggagcatccacacacctgccattccagcacatatggtaaaccttgggaagagactgagccacagttctgcccctgaccccatcagaggaagagaggaagaggaaaggagctgacatggagggaggtcagctgaaggatgagagagtggctaactggagcagtgtccaaggaggctattcaaggaggtccccagcatcccttaactctgggctcctccatctctgctaagcagaacccttccagcttcaagcaagactcaagacacttccttcccagcagtctgagctgttctggagactggcttcatgtttgcccagcttaaggtctcaaggacctgcgggaagcctccaaccctgccctgtcacccctctgtgcccttgaagctcactgctagaaagcactccctgttcaagaggacagatgaggtcccagaagccattctttccccgttctcttcttggctgtataaccttgagtaaagctgaaaagacacagggcgagctccagctgcccactaagacacttcagctctctgcttttcctagcttcccccatatcctgcccttcatgatggcttccccagggacccttcaggcaacccagtgactctactttcactgccccagggtagaaagatactacccacccatcatgggcaccaaacaaagaccttcagcttcactagcagagaagtgactcctagccaccagctcacctgatcctgtgtgaccttgggcagatggctcagcctctggatttctggtgtgtggcataactgactgtaccctgaaggcctcttagcttgggaaatctgtgttccacttaatgactccaggctctgaaaatgcaacccctcgaccactgccctcccctcgggctgaggctctcccatcctcccagacgtatgcaactaggccaagcgggtggacctcctggctgtggcctgaggccttctcatatgcaatatacccccctggcttctcacaggggtgtttgccccacacaacatccctagcccccaccccagtgagcatcctgcctgcctatgcattttgggtacctcccctgtgacacccacccccagagctgtatttttctctggctaagattagaacatattccttgtaaagtatttttctatgcgggttttcttagggctcccaggaagcacccagcacacccatggccccactgtacaggttgtttctggtctgtctggggcccacctataaatctttgtcccaccaggcatcacagtgactggggggaggttgagtgctattggggtgattttttttaaataaaattggttaaatgaaaaaaaaaaaaaaaaaaaaa

SEQ ID NO: 612 - DNA, 369 bp, Rattus norvegicus
  Genbank Accession No. AI059588
tttttttttttttttttgatgggctcggcgcggcctccgctcctgcccggcagagggcgccggggagcggaaagggctgcaagtttaataagttaatggggagtcttctctttctttttcctctccttcttcactttgggtttcttggccttgtctgaggagcgttcatgcttcttgcagccagcggcgtgcgccttcccctctgcctctgagtcgctggagctgctgctgctgctactactgctggagtcggaggagccgccagggccatgcctcggcttgtgagcagcgcctgcctctggccggcccggcgcctttaaaggacagtgtttggggtctcccacttgaccagccccctctggcttctta

SEQ ID NO: 613 - DNA, 637 bp, Rattus norvegicus
  Genbank Accession No. AA851361
acaagtttaagattttaatggctgttaaataataaaagggtttgcactatatacattctgtctacttaacatactatcagccagccatgcacatttcattgcacatatagacatagtgtacaagaatcttgaagacatcttatccatataagatctgcataaaaatttttacaaaatattgaagccatttgtatgatacagccaatttcatgaaaatactggaaactaatatcaaaagaaatattttaattttgaagaaaaaatatccaaaaataatggttaccgaactccatgttgtcaaagacatgtaaaaatatatctcaggaccttggggtgcaatgccctgaaggtacaacattctagaacatcactctaaatccttgtgtagataacctctgacctctgcttcggttgagtatactctgttaaaaatcctctcatctttacattgctacgccacttgacaaagcaggtatttgttcagtacaaaaaaatatccaaatatatttatgttaaagtgcacagtacgtatgacagaagtatcactagctgccagtgtgaattcccacacttcgaacccggccaccatgccctgaggcagcgtcatctaccgctgaccgcactcatccctcccata

SEQ ID NO: 614 - DNA, 558 bp, Rattus norvegicus
  Genbank Accession No. AA900881
tttttttttttttttttatctcccaacttgtccctttatttggcatttcatacataatgtacagtagctgtcatttccacatggttggtacatttcatttttccagggcaatcacttaaactccaagataatcttaaaacagaattcctccatgctgtctggaggagtccagggacaagaaagacagcctaagataaatactgctacatgctgcccgaatcaggcgtggtttccgaaagggtttcagcatggagagacagaaagtacacttctatgttcattctcatggtaaacaagtactgaatacttactatgtgctgggctttgaggatacaaagatctagaaggcacaggacccctagtctcatagcagcgcagtgagcagccaggtatagttacagaaaaagggcagtgagcctcacagacaccttcggtgacattagtgcaggccatgataccaagaaggggcacggtcaccttagcgcggactcagggacttacagaagcgcggagaaacgaaatccagccgaccaaacttttgtttaaaagacagaaaca

SEQ ID NO: 615 - DNA, 504 bp, Rattus norvegicus
  Genbank Accession No. AI237070
aagcagcttttatacttaaaactcaaaatgacaacacactgtacaaacataagacgacataaaataaaaagctatgaggaacatcctgtcgtcagcacacgacactgaccaaacgcagcccgcactgtctccaacagttcccaagggctgaggccaaggttcatcttcagaactggacagaggtactcgaaggggcagcttgtccatcaggtggagcttcagagccgggcctggcacggtcagctctcttctccccagtgattgtgacccctagatggactcgccgctgagcaggtcaccaggcagcagagtgttgagaggcgtggggctgccgatcactctggtatcatcagcactgggtgggccccacaggctgctcgagtactgggggaccccaccccacagcagctcactgctgcctttgccactcaggcatggggtgttccagtgggcagtgtcgctgcgcactaggccatgggtgctgcccgaggtgcccagcctggg

SEQ ID NO: 616 - DNA, 482 bp, Rattus norvegicus
  Genbank Accession No. AI008546
aggtcattttaacaacagaaacagggccaggtgtggtggaggcagaggcaaggggatctcgagagttcaaagccagcctggcctatgtaataagttccaggacaggcagggcttatgtaggaagactaactctgcctcagataaaccaaaagtaacagaaacaaaccaaaagaactctttcttatcagataagtactataaacattttattacatgaaatatttaagcccggtttggaacttttaagtttttgtttcaggtgccaatatcaagataatttccagtcataagatatttatgcagtctgaaaataaatgttgtctgtattgatgtcaaattagaatatgtcacattttccacaaaaggcaggttagtcctcaatagtggttacaggatatccctacattaaacaaaacattatacaagaaccacagtagaatatgatcattctagtcaaagagggctggacagatggctcagtg

SEQ ID NO: 617 - DNA, 407 bp, Rattus norvegicus
  Genbank Accession No. AI176302
ctgggcaaagtggctttattagtgtggcaggatcacaacaggacttaggaattagcattggggcccttcttcttgccaaaggtgggcacaacattgacaaagcgtcggttgtactgcattcgcctcttggcccgaccagtcttcttcttcttcttttcctgtttggccaccttgggagtctgacctctcactttcccagcacgagccagactgccactagtggaggacagggtgctgtcggagcccagagaggtgttggactgtgtgagcgaggacttgcggagtttgttgcggaggaagaagcctttggctttgcccatcttgcccaggctgcctaactcggggtcctccagggcactgctaggaaggatggctgaggcagattcgaggtcatacttcttcttgcc

SEQ ID NO: 618 - DNA, 1892 bp, Rattus norvegicus
  Genbank Accession No. AF034218
cgggcgggcttagctggtaccaggatggcggcggccctggcgtgggtcctggcggcgcctggtgcgagttcctgagctgctaccaggcaggtgacacttcctgtagcccccagcatgcgggcaggactgggtcccatcatcacactggccctagtgctggaggtagcatgggcctcggagcttaagcccacagcgccgcccatcttcaccggccgaccctttgtggtagcatggaatgtacccacacaagaatgtgctccgcgccacaaagtgcccctggaccttagggccttcgatgtggaggctacacctaacgagggttttttcaaccagaatatcaccaccttctactatgaccgtctaggcctgtatccacgttttgatgcagctgggatgtctgtgcatggtggcgtgcctcagaacggtagcctctgtgcacacctgcccatgctgaaggaagctgtggaacgctacattcagacccaagagcctgcggggctggcggtcattgactgggaggaatggcgaccagtgtgggttcgaaactggcaggagaaagatgtgtaccggcagtcttcacgccagctggtggccagtcgacaccctgactggccatcagaccgaatagtgaagcaggcgcagtacgaattcgagttcgctgctcggcagttcatgttgaacacactccgttacgtcaaggcagtcagacctcagcacctgtggggcttctacctctttcctgactgctataatcatgattacgtacagaactgggatagctacacaggccgctgtcctgacgtggaggtggcacaaaatgaccagttggcctggctctgggctgaaaatacagctctctttccctccgtgtacctggacaagacgctggcatcctccaaacacagccgcaactttgtcagcttccgtgttcaggaagcccttcgtgtggctcacacccaccatgcaaaccatgcactccccgtgtatgtcttcacgcgtcccacatatacccgaaggctcacagaacttaaccagatggacctcatctctaccatcggtgaaagcgccgccctgggctcagctggtgttatcttctggggcgactcagtgtacgcttcaagtatggaaaactgccagaacctcaagaagtacctaacgcagacgctggtcccctacatagtcaatgtgtcctgggccacccagtactgcagttggacccagtgccatggccatgggcgctgtgtgcgccgcaatcccagcgccagtaccttcttgcacctcagtcccagcagcttccgcctggtgcctggccgcacgcccagtgaaccccagcttcgacctgagggggagctcagcgaagatgacctcagctacctgcagatgcactttcgctgccactgctatctgggctggggtggtgagcagtgccagtggaaccataaacgggcagctggggatgccagtagagcctgggctggagcccacctcgccagtctcctgggtttggtagctatgactctcacctggaccttataagggatctctccccgcagatagcagtccagctggcctctggcacaaggatctccttggcacaaggagcctgttagggggtaggcaaatgagtctggagttggagtgggcagtacccccaggatgcctagaagagcatccataccacctgtcacccccctgttctaagggggagagaaacatcccctgagatgccctcatcttgccagagaagacgaggatacagttaggccggggaaggcctacctctactctctgttcctggatagtttataatcttggggtctcttttgtaaattaaatacaaaacaactgcaaaaaaaaaaaaaaaaaaaaaaaaaaaaaaaaaaaaaaaaaaa

SEQ ID NO: 619 - DNA, 481 bp, Rattus norvegicus
  Genbank Accession No. AI639256
ttccaaggcaagtaaagttgattttaatattgttctcttacaggcagattaaacaaacaggcaaagtacatacatagtacatggcagtcttaagtgacctcaaggtgtattattaactcagactgtgctagcaaaaattccagtctcttaggatgtaagatatttttatcacaatgcattgccacagttcctcctttttgttttattaaaaaaaccatgtgggtggagggggtcactggtgaagaactaagaactgatcaagcatggtactgtagggatagcctgaatgcaccacttcattctaggtgatccttctgaaaagttggcaaaggcataacaggacttgagaaggaaaacagaatgcattacctgtagaagatcacacttaagatttattccctgtactaacttaaagaatgaattcatcttctccaaccttcccctcccaagaagattcactggaatgacttacaggctgcag

SEQ ID NO: 620 - DNA, 595 bp, Rattus norvegicus
  Genbank Accession No. AI176963
atttcttaactttttattgacattggcaaattaaaatagaataaattaacaagtattttttcaaaaaaatgttttgtacaaaaatactgtcaaaatttcctaaaaagctttcaacacagtagtatcttttcatgtactgaatataactattagcacagtgtcaaaaatgttgaagacagaaacaaaataaaaatctgtgaaatgtttgccactgacgacattccacaccctatttattgtctgtacatatgggggagggggagacagccaacttgaaagtgaacggtatgacttttcctgatccagaacggtttggcccacatctgttttaatcttccagtttagcatatttgaaaacttaagtctgtactcgaatgcatagtttaaaaaaaaaatgaagcgagacggcagtttgtgcagtaatatctgcccttcaaagttcatgcagccaagaaatgcaatttttcctttcactcataaatctgaatgcagtgcgcagtcatttgaaaccatctacaaaatccacaagattaagcagtttgccaagcttaatatctaacagttgagcacgggagaaagtgaggaaacaaggagt

SEQ ID NO: 621 - DNA, 525 bp, Rattus norvegicus
  Genbank Accession No. AA900460
tttttttttttttttttcaagtaaccttaatttttatttaaataacctccagtgagagcacagttaagactaaccatttttctcaccccccaatacacctcacaaggaggtatgcggactgcctctcaatggaagcggccctggcctctgccccggccagctgctggagctggagcatccacagtggagcgggggttcttgatagtctcatccacagacacaatcaggcacgcagcctcacggtcacagctatctctttgattttattaacagccaactgggtggctgtgcggaaggctctgatgatgatctgagggtgtaaaccttcctccacgtagggcttcacctgcttcagaaactccgcagccagcagggtcactgaggtggtgccatcaccaacctcagcgtcttgggatttggcaatatccactaaagtctttgctgcaggatggacaacatcaaggagtttcagaattgttggcccatcattagaaattggtgctttgcctcggccatccacaataa

SEQ ID NO: 622 - DNA, 491 bp, Rattus norvegicus
  Genbank Accession No. AI009391
  misc_feature (1)..(491): n = a or c or g or t
atgggggcagccgagtctgcctggctgagatcgtgttgccaaggtgtccaatatccaactaaatatacacggtccacttgactattctaactggacacataacaggacaatgcccttgttcctccagccacggtaggtgtcgacaggtggcacacggagtccccaccaccttggtttcctggggcacagctgtctagaagcctatcttgcccctggtcatggagtagcccagcttggcttcattgttaatgaaggacatcagccccacgtaggtctcgatgaggagagggcggtccagcaccagcacgttgttcgcctgccctggcagtgggctttccttctgggctttcttgacagcttggattaggagagccttgaagctttccaaatggcacagagacgctgtcttctcatccatgccagccattgggtgttctatgaaggtggcatanggcatgtttgtaaaccaggggttccatttgttgatgaaa

SEQ ID NO: 623 - DNA, 620 bp, Rattus norvegicus
  Genbank Accession No. AI237645
aagtcaggtaaggaatcttcacattgttaaacaccagctgtatacatctataagggcatgtcagcaaagatggctgagtataggttagcaagtcccaaagatattcaaaagctaacacagtaaaggtcatgcgaattctagcagtgaatcatgataaaggcgcgctctattcttatgttcaagatatacattttacccgataataaccttatgagtaacagaagctgttattcagacacacattttacccaagactaaaccttagcaactcactgcattgattagcaaaggttattttagagactgatatggcaaaacgcacgccctttattcatggctgaaaatcccactatgcatggtgatacttgtgaagactgaaaataatctggtggatgtaacttgggtgagtggtgccaagaaccctgagagcctagtgatgttctcaggtggcagctttgagctgccccatgacaaaactgactagatgcggaatgctgggtaactagtctttgttaatttgatcttgctcattatttacataatttatagccaccatagtgatgggcaggtacataaagatccttttgcaagctttgtttcccaacacccgttattctcta

SEQ ID NO: 624 - DNA, 482 bp, Rattus norvegicus
  Genbank Accession No. AA891677
aaataaaaattataatttatacaagactttgtatctaaacaagggtttctttttaaaaaaaagtgacagaggaattttttcctatcttcagttctttatagaatatgatccttttgtagaacaaaagttacaccagtgacaattatttacagatcccaaacagactcaagctttacacacacagaattgaacattctaggtcagtgattagtcagcaattaaacacctgcccagatcacacagttcagtacaaaccccagtgtctctgtaactatgactagaggcggcctaggcccctggcccagccctgtccccctgagctccacccaaagacctgctggtggccaatggtggaactaacagttgaacttggggctgccaccgtcacctccctgacccactgccctggcctaaggtcagtcttcatctctctttcccagagaaagagactcaaactaaaccacttactccaccccgaaagc

SEQ ID NO: 625 - DNA, 472 bp, Rattus norvegicus
  Genbank Accession No. X89706
agtttgtcggcccctgcactacatgaccgtcatgaatcctcggctctgctgggtgctggctgctattagctggttgggtggcttaggcaactccgtgattcagtcaacattcactctgcagctcccgttttgcggacaccggaaggtggacaacttcctgtgtgaggtacccgccatgattaaattggcctgtggggacacgagtctcaatgaggctgtgctcaatggtgtttgtaccttcttcactgcggtcccgctaagcatcatcctggtctcttactgcttcattgctcaggccgtgatgaagatccgctctgtggagggacggcggaaggccttcaatacatgcgtctcccacttggtggtagtgtttctcttctatggctctgctatctatgggtatctgcttccagctaagagcagtaatcaggaccagggaaaattcatttctctcttctactctgtggtcacg

SEQ ID NO: 626 - DNA, 472 bp, Rattus norvegicus
  Genbank Accession No. AI237535
aaggcaaggtctctgtcattagggctgggagagatggtacagatcaagccaaacagtgaaaaataaggcaaactgtagcttcgggttttgagcctggcaccaggaaggcctcttcttgaggaagagggggcaggcagtggcaaatcagcagacgagatgcaaatggagtaacaatcacagttagtggggtaacgagatcaggcggtaaacccttaaagcaacacccaaggtccacgtctttgcatgtgcagggcacaactccagcagcagtttctgggtttgggggtttgttacttttccgactttccccaccccctaaaagacacgaagacgagctcatgaagagatcaaggaagggacgtcttctggctgcgctgggcaagggttgggtgacttccgggagcacttgtctaccttccctgtggctggccgagtcctacaaacgtttgtaggtgcccaggagcgctttgca

SEQ ID NO: 627 - DNA, 470 bp, Rattus norvegicus
  Genbank Accession No. AI233311
gaacaactcttttcttatttattcaaagagactcttggagggtcctgcataacccttgtcattactccaaccctacccatattggggtacatccaaagttgaccatcatgtggccaaagctgtggttgtgggagctcattgtgccccagcccctggtttgtttcttcattgccccaaagtgacagtacagatggtctccagttcaggtgagcctccaggtctgcatccagcaggaggatggcctatcctcagagtttagccggcaggacctctcgccgcaccccgtctgcccgagggcaggatcccctcgtcctggtttcgggtcttgtgtgacttctgcatccaagcacgccactggtcgtacaggcggaagctaaggttcgagcagtacgcgtgcttcttgagccagccgaggaactgcttgagctcgcgccgcaccgggcccgagctatgctcgccgccccgcggtt

SEQ ID NO: 628 - DNA, 694 bp, Rattus norvegicus
  Genbank Accession No. AI013911
ataatcaggacagtgatctttaataaaaaacatctctagtaatcatgatcttgatgtagattgttcataggtacattcagaaatcactttctggccatgagaaaacatcatttacaaatttttaatgtcccaaaatacacattaatttaaaaaacttgatttatcctggccacttttttctcttggccagcaacaataatcctgagtgcctcaacaaaaattctgataaaaggaaaaatattgggaccgttaacaaatgtcttaaaatttgtctttaaaagggggaaaagtgtttaaagaacacatggagctttcttaaagttctttaacaaactaccttgggagctcaattcaaaaatagaacttgatgtactaaaacagacgtttcagcgcagctccaaaaatctttataaatacagcaatttgcaaggacgatcctggatcagaagtgttattccttgtgtatattgtgtgcatgccccatctcagttgtcataattgtctctgtaatttcctcctgagtagcggtcatagccaccctggcttctgccactgtagtctctagaccgcccatacccatatccatagcctccaggtcggctgtcgtatcttccacttccatatccctggtctccaccacctctagagtagctgcgaccacgcccatgggccccaaaagcaccccctctgggtt

SEQ ID NO: 629 - DNA, 571 bp, Rattus norvegicus
  Genbank Accession No. AI102097
ggaagtcgttcactcatcttgtttattacagaaatttctagctctgcatcaagcacaacgcaatgaaatattacattgatttcttttccgtcatcacaccggcatttgcaaacacacagccaacgttgtaaataaaatatactgaagtagtgatctgaacctgaagtccaaaggggacatgtctgtgacgacagaagcctgtctctgcagtgtgccaagtgagttcacctccatgtgtgtgatcggcatttgaggacatgtcactacagagcaagtcgctcatttgcatgagcaactctgaaatgtatggcacccatatagtttcccagcatgggaccttgggacccctggggtttagtgcatatgcagataagtgacttgagagaacctgggtgcaactcccatttggccctcacaagggagcctcataggaagtgtcggcatcactgcctgtccagggctcccaaagaacttcacaaggtagagtgcggttttgtggtaggtgtgctctgttggagggtagactgatggggaagtttaaggtaaatcagaactaggttccagagtcaag

SEQ ID NO: 630 - DNA, 540 bp, Rattus norvegicus
  Genbank Accession No. AI137406
  misc_feature (1)..(540): n = a or c or g or t
tttttttttttttttttaaataagaaattttaatatttaattattaattaactgcttccaatattaattaatcttacaactgtgacatttctatggttctttcttccctatcataccagtgtcccttcccaagttggacacacctggatacattaaatgttttattttggtgacagacaattccttttattttagttagatgttttgaatgcctacagtaaatctgcccattccgggaggtcgcagacctcctggcctccccccaagtctatgatctcattttcacagataaacacccacttctcagaccagctacccaaagcatgcatgttctcgagtcctttgcaaaccggttattttgtctacataacctcctcatatcccttcctcacattcttcgtaggcagatgctggagctgttgctctaacctcctgagatatggtggcccgctgggggagtctgtttggcttcatttgaccttcncataccagctcncaccagtccagccctttctctgaggaacctggagaaaaattagc

SEQ ID NO: 631 - DNA, 368 bp, Rattus norvegicus
  Genbank Accession No. AA818761
tttttttttttttttttacaccgatggacgttccctttcctagctgacattgtaaaactccaggtagttgggagttaaacacaacccaccgtgggaaaagtaaacagactttcttaaattcgctggtaaaaaattctatcttgcccgaagaggtcgtgtctaagacagcaaatgagaccacccacccaccctttccgcggtagtccacgccaggcgatcagtctaggctgaccagtcccggggtctccagccacttcaatcaactctgatcgcagcaagatttgatttgttcagttctggatctcagccgaaggccggctcgcccacagcagcctgtgggggcgaggtgactcaagtcacttcccagt

SEQ ID NO: 632 - DNA, 282 bp, Rattus norvegicus
  Genbank Accession No. AA963077
tttttttttttttttttgacggccatttctgtaataaaacaataaatcgtgggggatagttaagggtatgagaaacgtcacactcttgttttgttaaaacaattaagcaatgagctatgtgggtcctttccttaatcaccagaacacacgcgatagcacttagccttttacttagctacattaatttatcccaacaacttcagctactcacaatgctaatattagaattcatttcagaataaaagtctttaaaaatattgttcaaccaattacaacccttaa

SEQ ID NO: 633 - DNA, 605 bp, Rattus norvegicus
  Genbank Accession No. AA945069
cccaaagctggttttaatttccaaaaattatgaggtctcttcccacactggggataataggatgggatagcccagactattatcccagtccaacccccagcctagcccaaacaccattgctgtctctgggtcccgtcatttcaccactgggagcttatttctaactccctcactggccaagacaggtggatggatgtgaagtttccaggactcagcactgtctctccaaagtgaccctgggtctcctctgtgaggggaagccatctgtgtcacgtcaaagtggattggtgtaaccaccaggctcaactcagatccaagtcaatcatccctgggtctaagggtcagcgcccaggtcctggtggccgttccagtgcctgtgtgcctactagtacatccatgaggtagtccagctcagcctcatccaactctggagtttcctccttggctgggccattctcagggacaggtttgagaccctcagaggctggtaaccaaagttcactgtcatacatggaggtatcaatgtcctcaaacaaaccctccagtccatcgtccaacagacagcccgtggctgggcctagcaagtccaaggcacccaggttggg

SEQ ID NO: 634 - DNA, 570 bp, Rattus norvegicus
  Genbank Accession No. AA799531
  misc_feature (1)..(570): n = a or c or g or t
aaggcggcagctgtttattttgaggtaactgtcacacagtactgttatatggtagaatagtcattatgtaatcttgagagaggttgtctaaggtaggatttggagccttccacacttatcagatgccttctcattagtttcttctagttttgcaattctagatccaaattgtatggcccgtttgggcagaagggcagaggatgagagaccaagttccacagctgcaaggcgtaaaatgagcttctcaccaactccacggggcaaagccaggtctaccttttcccaaactggcagagaattcaggaaagatacaacattttcatccagaaaaggaaatcttgcttcctttccatgatcagcaataactctatcatcacgaccaaggtttctagaagaaatgcgacccaattccattgctatttcctcattcaatccttctaggccaagagactgaaagcgggcacgatgacgggaataacctgccaactgctcatctgcnacaatcccagtgagaatcacctttgcactgctcttgntagactgcacagcatcctcggttcacaacaaaac

SEQ ID NO: 635 - DNA, 592 bp, Rattus norvegicus
  Genbank Accession No. AI235953
tctacagacacttctgaaaagagatctaatagagaaaatatacaaagcatttaagggcttcaccgccacggagcaccgaagtctgatgcgaggcaccaaagcctctcccaggctccgggctgagggcggccagcacgaacatcagtaaaaacatgcaggagaaacgtcacacacccctggacagaggggagagatccggaacggaggaggaggcagggacgaaagtaccaggtggctctccctcctgcttccaccattcacagtagccctggcgcaaagcacggcatgggctccgtccactgcccagggcctgcagctcacagccgatgacttctatacccacctgctcctgtgttcctaggtgccaggccagggcggcctagctcctcacttctttggttccactcagagaacaattgtgcttggcagattcatcccacccgccaactccaggctcctactggtgggctgaaggcactgacaggagtcctgggaagaacccaggttagccaccttatcttgtgctctgatgggtctaacccaggacacacttccccatccttagtccacacttaggtctaagcctcgtgcc

SEQ ID NO: 636 - DNA, 519 bp, Rattus norvegicus
  Genbank Accession No. AI176418
acaggtttctttgcacagatttattgttcatagtaaagatcaggattaaagcagagtaccaaagaagaccagaaatgaacaagctttattaaggcaaaaatctttattctcacatctatccaaatagaaaggcattcagttcttgaatgactttaatcttaagtcttacaaatagactcagtaccctatgtggtatatgtgaaatggaaaaaattttcagtagtagtttgattcttcaagcttaaataaaaatagattatgtgtgtgcgaaaagaggaaaggggttcaaggagtatgggcagcaaacctatgtctttctaagtctgcctgctttgtgtgctcaaatgccagagttcattactctgagaaaaaaaaaaaacaagacatatctacctccagtcagttctaaggtgcaaaggtcagtaagaggggacataccctgggaaggaaatgttccttctgtgtgcctaacagtgcaatacatactgcatttcatctaatgctttcttaccatcaatt

SEQ ID NO: 637 - DNA, 557 bp, Rattus norvegicus
  Genbank Accession No. AA859581
tttttttttttttttttaggaaccatttgtacttttgctcatgtggatgcgtgtggcgtctgtggagatcatggatctcctagagttagtcataggtgggttatagttatagtctgtgagtcgtgggaactgagctcaggtcctctggtagagctgttaatcaccaagtcacctccccagcctttcaactgggggacagcattctgttttattttctactcccaccccctttcttttgtctaagaaatgtttggctggatcatgaaaccctgtttgaggccaacattcacaggcaactgtgcccaggactggggtgggattccaccttctctagagaaagctgtttacaaaagcaggtttcattttacagcgggtttggaccaggctcctaagtgatggaagccaggactcaccacactcttggagcccgggactctggcaagcgctgaggggttcttcctgtgtgtccctgcccctctctctctggtggctggtgtgtcatgggtggttttacaaccacaggtcactccattaacccccaggaggaatgcgccagc

SEQ ID NO: 638 - DNA, 631 bp, Rattus norvegicus
  Genbank Accession No. AI171587
atatatacaacaaatttttaattatgtactgaaaataaattacaggaaataactttaaaatgcaacagaggacaagtcacaataaaacattcccattgaattctcttgggggtgagattgcagtgctcaaggaagataaatatcacaaatatatcaaaacttcaaactgtctatgcattcacacactgacatgagccacagacattcctttcacaggactgtacttattagcctaccacagaaccagattttgccataaactacaaaacttttaatacaaaattgtatttatatatttataattcatatacatgccctacctgtaatttttagaaaataaaagctacacactgtacagacactcttaactcacagctgtaggcaacatttttggatggaatttctcccccaataaaattaatggcgtattttatgtacatgaaaggctaaactgcaaagacagctcagtttcccagataatgcatctccgttcagggcaggtttacaaatttaaaaaggcaagacaatgtacacctcagaattaccttctcagctacgagttgtcatgtgatttctgtgaagtttctgatacatgcatttatgtaatactggcattgaaggcagtaaagca

SEQ ID NO: 639 - DNA, 703 bp, Rattus norvegicus
  Genbank Accession No. AI231799
ccaaagtcagcgctttattctctgttctgtcttaggtgttctagtttgcaagcatgaaggaatcaactatagtgctcccccttaacgtccttcattaaaaaaataaaacaaaacaaaacaccgcttagctggtctcccgctttccctaaagaggatgggatagaaggtagcctaaaggaggctggaggactggagtcgcttggtgttaaccatcatgtctcctgccagctcctctcactgagcagccagaggccgcaggcagctataaatagcccagcagctctccccttacagcgagggaatgaacttggcaacaacaaagagtcataaggggtgaggcaggcaaagactgggagcctgtttgctgctcaccccttggggatactgtgagattcagcagacaaaggagctctccctgccttctcctccagccgggaacacgcagcctggaagggccaggaagaacttacttcacccgagttcacctgagtgccctcgtcagcaaaatgagagccagagagcagggataagtgtcgaacccaggacccctgttgaggggttccaggatgggcggtgcccccagctcccagacagtaaacggcactgaggagggacagacatccttccatgtcactcagttcacaggacagtctctcgaatgacaccaatgaggctgtgtggccgctcagcctcagctcgctgc

SEQ ID NO: 640 - DNA, 332 bp, Rattus norvegicus
  Genbank Accession No. AA998197
tttttttttttttttttcacctttgtaaactttattcacaaactccagacccctaggcctggcttagccacagggtacattcattcttagcagtggcaagaaccccaatataacacattcatcaagactaaccattttaatttaaattaaagcatttctggaagacaaatgcaattgatagaaaatataaaaacttttactgtacaaattttacatcacattcaacagaaatgtctgcctcgtggccacagaagacgctaggtatacacactgatcactcctggctgaattcacagtatctgtcatccttcatgtgtttcccaggagataag

SEQ ID NO: 641 - DNA, 516 bp, Rattus norvegicus
  Genbank Accession No. AA874999
tttttttttttttttttataaagcaattccaaagtttattgccatagaaaaaactgatttctcaaagtcaattcttattctctgtaaaataatacacatgaacagaaatcactatacttttggtccaagatatgttgggtttttccttcttcttcagatgatggatagatgcagccaaaatctatgaacgcgtgtacttgccccaaatgtgcagcataaacacagaagcgatgaacagaagactcatcaccagtactgggacagggccaactttgagccctggggaatcttctgtgtagaatcgccacatccccccagtccctgcagaggtggtgcggcctgcactccgggttccgcagctggcattttttctctgccggacagtggatcccgccgcccgtgcggccactgctttgctaggagaacgcccagaggagcccacgttggtggcactaggcgttggacccggcatgctgatgtctaagaacagtaggcacaagagatatgaagatgaaa

SEQ ID NO: 642 - DNA, 658 bp, Rattus norvegicus
  Genbank Accession No. AA892598
acaaacactttttattttgtttttaatttagaacatgatacatattcacaagatttacactttatatcataccaaagcaatctagaaacactgtacagagcacacttgaacatttagaaggctatatataatctgtggtaaagtcataggcatcgtcttcttcactcattttatccaagataaaggatctgtcagatggtttacttgctgttgattgcccaggtgacatctccctggtctcttctacaggagtcacatctgagatctctgcatttttttcaccagtaacatgttcttgatcatcaccatcctgttggtcttctgtctgttttggtgactcttcggggatgtccttttcttctagtattccatttgtcaggcccgaagaccggaaaaggattttattagttaaatgagggcccttgaggacttgtatgctgtgtgcattattcttttctagttcttctagattaaagcccctcttcatgattgctgtaatattctcattaaaatgaggagaatgattccaggatgcagggggatggcagtagtaacctaatgaggcacctgtccactcagaccatagcagcttagcagcactttcgacatttgggcttccacctttttggtgcagacctcttctctgagcaagtttagt

SEQ ID NO: 643 - DNA, 493 bp, Rattus norvegicus
  Genbank Accession No. AA900290
tttttttttttttttttgtttgtaagttcgtttattaatattaggtaatattcagaactcagacattaagctatttaccatcttaccacactggtcagttattttgtttggaagaggcttcaacaattggaagagaactccaggttatctttttgactcttacatttttttttagaaaatttgaacccaatcatctggctgtcttcgggatttttttcgagagagggtcttgatatacagcccaagctggcctccaagacagacttccttgtctcagctgagtgttgggatcacacctggcatcttgataggatgtctcactaatattcttagcagctgttctcaagctacttgtaaaaagcacattgcagaagaagtgatggagtaatcttcacatctaccaatgtcatcacaacagaaaaggcacaaatacccgacagtgactacagtggaaactagaaccgaacgctacagaatctctgaaacacaatga

SEQ ID NO: 644 - DNA, 664 bp, Rattus norvegicus
  Genbank Accession No. AI233213
aaaattttaattcaagtacaagtcagctagttaacataaacagaacataaatgcacataatttgcagccatgtacaaaagtgcaacaagagcaacactcgcatggcccggcaaagctcgttagctctcaggctgcctagactgactcattggtgtaatgtacttcacatccactggggtacattcagaaagctttgcatgactcatcacaactagtcctttagtttctaaatagatagcataagaatccaggtataattatggagaaacaaggttataggggagaagatatgtgaggggcagaaagcactctttatttcatatggtaagattctgtcctatttacgcggacgtatggatcttaggaatgttgaaagtcatggtaaaggaggatcacgggctgtgtatcagccctcaggagtccctactgtaagggcagtttggacaggagagcctgtgaactgcgaagtaggaagaaagtcctcagagatagggggagaccaatttctaccacttacattcttcaaatgaaatcattatttcacggtgatttttaaaagccaaaaatttttagactttagtaaatgaacagttattcttctgaacaccacagatgtgcttatcctaacaaggctactgcaaggagacatccaggtttatgtgac

SEQ ID NO: 645 - DNA, 577 bp, Rattus norvegicus
  Genbank Accession No. AI231217
gtaaaaagttggtttatttgtcatgttttcactgtatctcagttaagccattttggtgtccacagtgacagtcctcttggaagccaggtcatccctactcacccactaacagtgaccatcaaccacaagccaccaggcccggctgacagctacagcagcaagtgagactgtggactcctctaggcctgatgctcctcagcacagcccagagctggggactctgcacccgcttgccagaagctgtggagtccctacggtaggtgggaagccctgctgctctgtggcagtggcagaggaggggcagtgggaagaccctgtggactgggagggcaccaggctcctctgctcaggactgggtctagacaaggccacgtgtgatatggtgtgagtcctgggctatgtgcaagggccctgatgctgacctgtgtcggggcaagtggctaattgtcccttgattgccatttgctggcaagcatagcagcaagagtccctagaagccctgggtcatggaggcatttgctacttccactgaggtgtggcggacccacgtgtcttgctgctggcaggccctcgtgcc

SEQ ID NO: 646 - DNA, 568 bp, Rattus norvegicus
  Genbank Accession No. AI103616
gtcattttagggctgaattttaatagactgtaagttggaattcttacatttaaaacagaaccttaaaattactgactggttcattggttcaaaatggttttatggaaaaattaatctgtaacaaaaacttggcatcagacgcgaagactccgccattttctgagcaaagcgtacaaaggctccagggaccaagaccgagggaggggctcagacatttacaacagcaggcattttctcttcctcttcttaacaggagggggacagagaacggctcggatagcttcatcaaacactgtcttgagtcctcgctgtgtgagtgctgagcactccaggtatttgacagcaccgatctctttcgccatggctagcccctgcgggtaggtaatgggagtcagcttcttctccttcagcttctcaatcgtgtccttatcatccctaagatcaagcttcgtccccactaggatgatgggagtattgggacagtggtgtcgtacttcaggataccactttgcacggacattttcaaatgatgcatgactcacaagggaaaagcaaattaagaacacgt

SEQ ID NO: 647 - DNA, 670 bp, Rattus norvegicus
  Genbank Accession No. AI235948
aacagtttttttattattttctgcacatttgtacagctgtaaactcaaggaatcatccaatagttgtatacatctggagaaccattaataagcaccttcagtggtttccacagcttaagatttaccatgtaaaacattttagaagggatctagtaaaatgaataaaagttataaaagttgtatatcatgaggaacgtgacaaaaaaagcaaaaaaaaaaaacccaaaaaacaaaaattcgaggctactttatgaggttgcatgaaagagtcacatgttccctaaatcttgtgatttaaattccaattatgtaagtaaagactcccttccaatttaggttcccagtccaatgtaagcagggtgaggtggaggtaggagatagggttggagggctgactattggcaaatatgttataggctccattgctcttccatagaaatccttctagacctttgctgaagccaaccacggcaggtacttggttttcatccttcttcgagaatgttgtaaagaactgtagaccatcatcaggataaaggaaaatagcataggagctggaatttgaggaggccagaacagcctggaacgtgtttctcttgccttcctcaacaaggctcccactgggccctccttagggagccatggattcccaagtgacaaccaccacact

SEQ ID NO: 648 - DNA, 660 bp, Rattus norvegicus
  Genbank Accession No. AI172057
aagtggaactttctctttatgacagatcagcataagcaccctgcggagtatttcttataaaacagtataacagtgatgcagaatgatctcacaaagccatcttcggacctgacatccgggctatagcctaagagcctttagcaagtgaccgatcaatcacaacattactatgatgctcattatttaccaggtaaacctgaaataaatcaacaaaataaaacaaggacaaaatccaagatctgccaaacgacgactgtgtttagtaatgggaaaaacactgaatctgagccggtccatctgaattcttgtctttgtccttggatggatgatctgagaggacagccttggttaagtctttcagtttaaattgacagagctgcttttatggttgtgtacagtctttttctaacaacgcaaacttggcaaccaattcgacctgcatataccatataactcctgtgccctgtgtcatctcagtcctcaaattaacaaacatcgtgtggttccttaccagacacaaactcgagagacatggtttcatgacagattacaaagtcacggaagtccgaagaaatatgagttgacctcagacatccttcttggtgaaacaatgcaaggacttacggagagaaacaagcgagttcatacattaattacacc

SEQ ID NO: 649 - DNA, 387 bp, Rattus norvegicus
  Genbank Accession No. AA944806
agcagcctccaatacctagtattttattttagtgcttaggcagggactgagaaacaaacacactgaacacaacttattggtcttcatccccaagttcaaggggcactggcgagcctctcctggagctggggctctccaaaggttgatggtcttcactagccaactttggtgagggatggaatagggagttggaaggaaagggaatagcaaaaaactgcagaattagataggttgggttcttctgaaggtgcctggagattgggaatctagctgtgggacccagcttttcctttctgaggagtcccagtagtctcaacctagaagcaagtgtgtaggttgggaagaatgctgcgaatttgctctttgccatgaattctcgggctgtga

SEQ ID NO: 650 - DNA, 480 bp, Rattus norvegicus
  Genbank Accession No. AI178530
aaaagtacataccgatttattgaacttgagagtaacagcatagaatactttccccagaacaggagtagattcaagcacgtgtctcaagaacactgttttgagtccgtgggttttcattagaaatggaaagagttcattcaaagggcagacctatcgtctagtgattgtaggaatggtttcctacgtttgctagaagaggttctacaaccttacgacgatccactggagtctatgtactttcttggttgtagggctctggagttaaattattgtggctgatggtccctcttttctggcctttcttctgcattacttctccctcggacacatggtctccacaaattcatatgggagttgaagggcaggggacaccatctttgggtggtactacttctgggtggtggggttaaaagtccctgtgacccctgaaggctatactatgttaggttcatcactattttgagttcttacatgtgtttt

SEQ ID NO: 651 - DNA, 522 bp, Rattus norvegicus
  Genbank Accession No. AA818475
tttttttttttttttttaacttgaagagtcatttatttctgctcctttcaaacaccacgttgtccaggaaacaagtcccccatgtgcatctgaagtggcagagtagcccacacgccgtttcaaggcaaagcaccgctgcagaactggccagtcgtccaaattatctcagctctcatgatacacttctcgatttgcattaatttctgaaaatcagaaatatcatgtccaaaaactatgatgggtttataaaaaaataatcattgtattcaataccaaagttttaggaggagtatattttctttaagaaataaaaaactaagaaaaaatgccatttaacacagctggtacactgggataggtcatcaggaaaaatactgtagtgcacttgtctctgacaccacgacttccagcctagctgtgctgtgcttgctagggtgtcactcactccatgcaatggttacgccactctccaatcttttccacattgcacagggagtggttcagcctttacaacttaattaa

SEQ ID NO: 652 - DNA, 616 bp, Rattus norvegicus
  Genbank Accession No. AI178504
cactgcaaagttacaaatttattggtctggaaataaatacaaacatctcattaagaaactgtcctggaaagacataatacaatgatttcttgtcagcattcagtcactctagcctggatccctgatctttctacacaaggtcagtggaaggctccatagtaggagttggcaggtaaactgattccttttctctcatgccacctacatggtgtgactacattcctctagcaactccaagatcctgggactcaccaagccttgagggctgactcccaacagtcaagtgtctctgatctgatcacatttcctataggaaaattccaaggttagccacagtaagaatcgaaagacagtagtatagggcatgggcattaggctggcattgcttagagaggccaatgctgcaaacccagtcagcaggaggggcaggaaagggaagcaagttcccacggaatgtacagaatccaaaaaccagtcattcccccagcagtacacatggttctctctgaagaaccagcaaggggccaggtgagagacattcagttatcaagtttaaagtcaatgctacatatcaataatgggagacaaggtgtgactcattctcacaagattcccc

SEQ ID NO: 653 - DNA, 585 bp, Rattus norvegicus
  Genbank Accession No. AI103939
agaacaaaatagatagactttattaaatatatgttatgtgggttttaatatcaaagtagagtgtgcgtgaacggactcctcatccatttaacaaaaatatcaattgttgctaaccatgaaatgattaaatgccacgacatacacaattgttttttaagtgagaaagaaaagaatcacagcttgaataaatagagtgttctcagctggtccaatcaaggcataaggcacacattgaaatgagggattagtgaatcagaaagcagatactcaggcacacacacagtctctgaacatggcggctcccacaatccaacactcattctccctggaggagagagctgtgcgtgctgcgagtctttccctccagggtcaagtgtcttcaggcacccatgcttcttgtgcacaggcttctccatgcaggagaaatactgctactaatacttttttgggtaaacaaaacctttatgatgtaacaaaaataacatttttaactaatgccctttccctccaatccaaaatcgagtaaaacagaaaatagatggtaaaacctggacttcagcatccacggaaaacaaatgatggctg

SEQ ID NO: 654 - DNA, 425 bp, Rattus norvegicus
  Genbank Accession No. AI170948
ctcttgtattcgtatgaatatccacatggccatatttacatacatttgcatacaatggggagggtgcaggatgacagttgggcatggggctcactgtgccgggggcagcagcaccttcagtggcacctggtccccctgggcagtgggaggcactgcccagacagccccagacgttttgccggtggtgctcctcttggaggtcaatggtgtctccagggtgagggaagcattggccatctcctggggcttgttgctggccaggaagcggaggaggttgtgcagggctttggccacgtcactacgggcaccctcgttgaccaggcagtagaggatggggtcagccacgcaattgaggctggtgaaggctagggagctgtggtaggcagagaagactcgcttctcgaagccacagtcccagggccggc

SEQ ID NO: 655 - DNA, 455 bp, Rattus norvegicus
  Genbank Accession No. AA925924
tttttttttttttttttactcttttcttatttattcaaagagactcttggagggtcctgcataacccttgtcattactccaaccctacccatattggggtacatccaaagttgaccatcatgtggccaaagctgtggttgtgggagctcattgtgccccagcccctggtttgtttcttcattgccccaaagtgacagtacagatggtctccagttcaggtgagcctccaggtctgcatccagcaggaggatggcctatcctcagagtttagccggcaggacctgagggcagaaaagaggccacattaagcctgggagtcttgagatgactccctttcagcagctggatgatgcagtgaagcctgacgcttccctgttgcagctaataaatacaagctaaatgagcgagtgctaagagcttcccgttgagcaacaccaagggagagggagagaaac

SEQ ID NO: 656 - DNA, 512 bp, Rattus norvegicus
  Genbank Accession No. AA875495
tttttttttttttttttgtataaaaaagatttattgaaatttatcaatgacaaacagacataaaactcaaagtttggctcttctcaggggcgggagaaaaatgagttacagctgatctgtacaaatgagacacagggtaggaaacagcacgtcacttctaaagcaatctggaaggggggcgctgaaggcacacgcactctctaggagaaatctgcggccacttcagagtcccaccaggtaagaaaatacgagcttgcattccttttccgtgctcctatgtatttgagaaggaaaacaaacagaacaaaaacccagaggacacacagggcgcttccagagcttagatttgttaaaaggttctaagctggagcgcccgaggagtcctcctgccatttctgtaaaacaaattgctctaatattttacagaacaagatagaacaggttggcttttctgaagaagctgaaacacgaaggttcacttctttcccattttacgtgtctcctaaacctgc

SEQ ID NO: 657 - DNA, 537 bp, Rattus norvegicus
  Genbank Accession No. AA818798
ttttttttttttttggtgacgccagatactttactcatctcaggcagtctggactagttcccctcccgtggactccagggtaacaccagaactgtcctagaccatagctgtcctctctggcggctggaggtaggcctgcagggcacggtggaggaggaagcaggtctgtgggtggagggaagcaggtctgaaggtggagggttccagtgtagttgtggctcatcctttcctatcacctctcggggtgcagcccacactctggtcctcgtgtccacatgagggccactgtttctagctgaatggacatatccagtgtcgataatcacccctcctcatcatggttcacagtgttgcttccagggacatctacctagacaatggggtccccaaatgtgcaggcctcctcaatggcgaggttgtagctggaacctgtccctcccttataggtgctggtcacaattctcatccagcctcgctcaccccagggctcgccccatgaattgcggacaatccaatactcgatgccatcattgctga

SEQ ID NO: 658 - DNA, 662 bp, Rattus norvegicus
  Genbank Accession No. AA892367
gatgagaccccaccagctgcacaaagtactcctggcatcaggcaccttcctccttggcaatgcgatctttcttgagcggtcccatgaatgctttcttttcctccatggtctggaagcgaccatgtccgaatttggaggtggtgtcaatgaacttcaggtcaatcttctcaagagcccgacgcttggtctggaccagcaaggacttccggagagtaagcactcgcttcttggttcccaccacacagcctttgagcatgatgaagtcattggtcacctcaccataatggacaaagccacccagtgggttgatgctcttgtcagacaggtcgtagtcagtagatgcattgttcttgatcagcttaccatccttgatgaggtagccttgaccaatcttgtaaatcttcttgttgatctctgttcggtgatggtagcctttctgcccagctcgagccacagagaaggctacacgggcaggatgccaagctccaatacaagcaactttgcgcagacctctgtgggtctttcggggcagcttctttgtatgccaacgactggtcacccctttgtagcctttgccctttgtcacgccgatgacgtcaatcatctcatcttggccaaacacctggttcacagggacctgctgctccagcctctctcgggcc

SEQ ID NO: 659 - DNA, 1542 bp, Rattus norvegicus
  Genbank Accession No. X61295
catccaccatgatcaagtaggcttcatcccaggcatgcagggatggtttaatatacggaaaaccatcaacgtgatccattatataaacaaactgaaagaacagaaccacatgatcatttcattagatgctgagaaagcatttgacaaaattcaacaccccttcatgataaaagtcctggaaaaaataggaattcaaggcccatacctaaacatagtaaaagccatatacagcaaaccagttgctaacattaaactaaatggagagaaacttgaagcaatcccactaaaatcagggactagacaaggctgcccacgctctccctacttattcaatatagttcttgaagttctagccagagcaatcagacaacaaaaggagatcaaagggatacagatcggaaaagaagaggtcaaaatatcactatttgcagatgatatgatagtatatttaagtgatcccaaaagttccaccagagaactactaaagctgataaacaacttcagcaaagtggctgggtataaaattaactcaaataaatcagttgccttcctctatacaaaagagaaacaagccgagaaagaaattagggaaacgacacccttcataatagacccaaataatataaagtacctcggtgtgactttaaccaagcaagtaaaagatctgtacaataagaacttcaagacactgaagaaagaaattgaagaagacctcagaagatggaaagatctcccatgctcatggattggcaggattaatatagtaaaaatggccattttaccaaaagcaatctacagattcaatgcaatccccatcaaaataccaatccaattcttcaaagagttagacagaacaatttgcaaattcatctggaataacaaaaaacccaggatacgtaaagctatcctcaacaataaaaggacttcagggggaatcactatccctgaactcaagcagtattacagagcaatagtgataaaaactgcatggtattggtacagagacagacagatagaccaatggaatagaattgaagacccagaaatgaacccacacacctatggtcacttgatttttgacaaaggagccaaagccatccaatggaaaaaagatagcattttcagcaaatggtgctggttcaactggagggcaacatgtagaagaatgcagatcgatccatgcttatcaccctgtacaaagcttaagtccaagtggatcaaggacctccacatcaaaccagacacactcaaactaatagaagaaaaactagggaagcatctggaacacatgggcactggaaaaaatttcctgaacaaaacaccaatggcttatgctctaagatcaagaattgacaaatgggatctcataaaactgcaaagcttctgtaaggcaaaggacactgtggttaggacaaaacggcaaccaacagattgggaaaagatctttaccaaccctacaacagatagaggccttatatccaaaatatacaaagaactcaagaagttagaccgcagggaaacaaataaccctattaaaaaatg

SEQ ID NO: 660 - DNA, 437 bp, Rattus norvegicus
  Genbank Accession No. AA800186
ggccaggtttggtggcacctgctttaatttcagaatttgggaggtagaggcaggtggaattctatgagttcaaggccagccagggctgtatacatagtaagaccctgtctcagaaataaaaaaatttttgtgttgtggattacatataatttaagatttattactttttaaaatgtatagttcattggtggtaagtaggtccgtaagttgtgactgtagctacaactttgttttttagtatgtatttatccatgcatacatgaggaagtcagagatcagcttgtaggtgtccatgaatttaaactcaggtcattaggcttaactataggcacatttaccccttgagccttttctctggctcttttatagcttgtaaacctgaaactgtcctcatcaaacactgatgatgtcccacctgtcccgctccccctcgtgcc

SEQ ID NO: 661 - DNA, 431 bp, Rattus norvegicus
  Genbank Accession No. AI030806
tttttttttttttttttaagaaggaagtgtttattttgtgcatgattccagagagataacattctacaatgggaagcatagtagcaagcatcaggcatgatggattgaacagaaaactgagagcttacatcttcaaacacaagtaggaagtagaaagggtggaaaagatatttgatgatgctatgcattgccgaagacagctcacagtgatacattccttccagcaaggctgtacctcttaagcccgccaaacaacaccaactggtgatcaagtgttcaaacatatctagggacagataaccacaatgttatctcacctgagaaagtaggcttcccactcttagcagaggctggatccaagcatactgctgtatccttgccaagaaaatttacccagtattgtacacaaaattcataattacctttcctga

SEQ ID NO: 662 - DNA, 528 bp, Rattus norvegicus
  Genbank Accession No. AI013553
aggaaacactatacaaagctgagctttcctgttgtttctgttaacagcaggaaattcaatgacacaaactgtttgtgatgctaagaacaacagtcagcaccagacttgaaaagttaggtacaacacagacatccttcaaaatgaagtgtcagaatagcaagactgttaaaccaagttgaacaaatgacaccacttgggaagtgactcctcattcttgttgaatttcacattcattgagtatcttttacacaatttattgttagtgctttaaacaaaacctccatataaggaattattacttgtaataagatataaatattcaacaagaatagttttgataaagaacctcatgtagttcaaattctaatatgtactgaccgaaagaaaaaaaaagtaacaaactgtgtttgtttaaacatgtttattacaacagatacaattcacatctgactagctttgtttctcctttcccctcccacaaccatgttcattgggccacttccttgtatttgagcagtcaatgtactt

SEQ ID NO: 663 - DNA, 400 bp, Rattus norvegicus
  Genbank Accession No. AA957422
tttttttttttttttttgagcgtgatctctggcagctttattggggggtaatcccttcccattgtttagtgagcacagaggatcagggaaggaaagaggaatgaagcaaaggaggatgggagaagagaaatgtcagtgagtaagtctttggtggatatggggacattgatttagagcctagcatggttctgggaataaggtcagctagttccagaagcacggaggtagcacagccacgtcaatcatgagggcgaggagagaattaaaagcggaaaaggaatgcagctgagaacacgtgttgtaaagctattggggtggtttctcatgtttcagagtctcatatgtctcctggttccgggtgttcaggcccgtgtagacagcaaccgatttctcacggctg

SEQ ID NO: 664 - DNA, 592 bp, Rattus norvegicus
  Genbank Accession No. AI009661
aggatttaacgtctttattacataaatgaataaatggctccacgattcagccgcaatagctttggaaggaatggggacaggggtagggtctgaatgtaactgcttatttcacggtcttatggtagctgaagaactgggtccaggaaccactgattcctatcacatactgcacctccatgaaggcaaagctacaataccaaggaccaaaaaactgcgcctgctccacgactaaatcgcaattttatataaattcttctactgctactctggctttccttttgatcagatacatcttttgccttttaggaagtaagtattctaatagtaaagattccccatgaagactcaaatctgattttcccaacatttccaacccgcagcaggaagcagagctgtgagctggagttaaaggaacgatctctgaaccgataggatgcgttcctcatgtccggtctcttgtgttcaccggtaactaccgccacgatcccggggaagagaatgcactgcaagcagcagcagaacttagccttttagaaatcctgttttgtctcaagacttcaggttctcactacttctcaaagcagtattactg

SEQ ID NO: 665 - DNA, 467 bp, Rattus norvegicus
  Genbank Accession No. AI232385
gtggtactttttatttggtctttaaactgtgcttcgtattaaatatgacctttcccaagtctcacagtatttctagttatttctgtgtaaacacactgtgacggcgagcttcagtgtcccctctaagtgagtaacttataaactcatgtcaacacccagccacctcatgtgctgcacctcagatcctatagctttctgtccagcaggtccacagccagggtaaagagaggctgggaaagaactgaaacaaaattaaaacatggccttgcctgtgttccgtgatgctatggaaacacatttaaagtttttttcatctcttttaatcaaataagcaaatcaagaaaggtcaaattctagggggttctatgctatcaggaaaaataaaaatgatctgacttctatgactgaagaatgcaggacaccagggggtgcatggaagcaaaacacttgaaccagccaagaagcaa

SEQ ID NO: 666 - DNA, 520 bp, Rattus norvegicus
  Genbank Accession No. AI235919
aaaagtgaccagcttgttttaatctttaagccaggacttcataggctccattcacagattattgagggactatggttctgtgacagcacagaacattagtgttggggaacaaagaactgatgaggatggtggaatggacagaaacagccacaccttatctccagctgtggtcaacgaagcaggtaagaagcttggagagacttggtcctaagggagagtgactatccacagagcttcttgtgagactcgaagtgatgtttaaagccactctgagaagacttcccaaaactgtctgaatagttgccaggaaaccaccgaagtgactgtgccatgggattttgtgagtgtgagcgacttttaaggctcattgctttaggcaggaggttgaactacctggtctaccttctgatgcacaatcttcacacacataggcttgccttgcacacaaacacagcaggtccgtctgacacaccaagtgaggaacgggcacctaacaatgtgcaaatgtcccttaaggagt

SEQ ID NO: 667 - DNA, 518 bp, Rattus norvegicus
  Genbank Accession No. AA891785
gaagagctttttagtagctaaatatggcaccacgtgactcagggcaatataaattacagtatgcaaaacacactgactggctgaggtaaagcgcaccgttcctgcctcgtgtccactgtgagggaaattgctcacatgctttaaaaaacatctccatcatatatatatatatgtaaaaaaataatcccctagaaaggccaccagagaggggggctacaacgcccaccctctaccatgtacggagcacccactggagctgggtagtgtagtgtccacccctactgcttgcccagagctctgtgtccaggcaaagatgctggcaatagggttggtactggtgggccggcccttctggtgttctcggtagtggcgggtgactgtcccgtgagcagcctcagcttcaatggtcttcccgtcagggcagaccagcacagatgtcatcaggccaagggagccaaatccttgagccaggatgtcagactgtacatctccgtcatagttcttgcaggcccacacaa

SEQ ID NO: 668 - DNA, 551 bp, Rattus norvegicus
  Genbank Accession No. AA997486
tttttttttttttttttcagttttcaaagtaaaatctattaaaaaatggtaatatacatgtgtgagaaatacaagaagtggtcactgtggttagtcacagacgcaagagatctaaggatccgaggcttgtgaacacagtaattaagagtaaagtaatatgcgagttccaattgtgtgcacaactttgagaagccggtcaagtactactagaaaacatagtatagttggtaactctaaaatttatattattccttttcctttaatatttttaggtacataccaatgagaaaagcaatttatctgtatgtaagatcaacagaatttttgtgttctagactataaaaagttaatatttaataaaatgcaacatcaacttataaaaaagaagaacaaagcaacacattatataattattttatggtctcccagctgatctgagaccacagaaggcatttaagaaagactgtcaggtaaacaacaaagaccaacccatgggatgtatactgtttacgaatttcacttgcagggaaacgagtagcctggcttaattt

SEQ ID NO: 669 - DNA, 498 bp, Rattus norvegicus
  Genbank Accession No. X61381
tgtgtgcgatcgcggtggatcgctaccatgaaccacacttctcaagccttcgtgaacgctgccactgggggacaacccccaaactacgaaagaatcaaggaagaatatgaggtgtctgaactgggggctccccacggatcggcttctgtcagaactaccgtgatcaacatgcccagagaggtctctgtgcctgaccatgtggtctggtccctgttcaatacgctcttcatgaacttctgctgcctgggcttcattgcctatgcctactctgtgaagtctagggatcggaagatggtgggtgatatgactggagcccaggcctacgcatccactgccaaatgcctgaacatcagctccctggtcctcagcatcctcatggtcattatcactattgttactgtcgtcatcattgctcttaatgctcctcgtctccagacttgatagaggattctggtttctgatcctgacgtgcttcacgctctgctggctgcccttttt

SEQ ID NO: 670 - DNA, 446 bp, Rattus norvegicus
  Genbank Accession No. AA891041
aaatagattcaataaaaagtcaaacacacacacaaacacatcttaaaatagactttagacacgaagtgcgtgtttcttctccacagtactgtgcagagggggagggcagggggcggaggttcctccctagtatccccacaggctgagtaccaggcggcggggccagctccgccgcgacaacccccttctcccctccctgttaaatacacaaatatattatattcaatatgaattcagtctctttccagaaaaaaaaaacatacaaaatacgctggaagggggccatgtaaacctcgaggtggaaggactgggcgcaggcgggcaggccagagtccagtgtgtgagctgcgccccagacctctgggcgagtgcccatcgcctgcccccctcaccccagtggggggcgggcgcccagccttcaaggctgggggtgtccgtatggagca

SEQ ID NO: 671 - DNA, 522 bp, Rattus norvegicus
  Genbank Accession No. AI044850
tttttttttttttttttcaccgttaacgttgtatttattgttatttaagctgctcagcaaaacatatacacgtatatacagtatgcgtgaatacggaagactcaactttacatattttgttttttttaaaaaaagaaagaaaaataccactcagtttcatgagctattgtcagtcactgtcttccaaccaagcattcagaaatggttttctttaagagtcaagaaagctgacaggctcgcgcaccgcaccgcaccgcaccgcagggctaagggttcatatgatacatgtgcaatagcaattcccttctctctactggagttggctgcgcactgattacagtgttcccaggctcctgcgcttcgggcggggttttcttctacttttattctttccaccaaaccaaattttagtgacacgatgatgtccttttgcttaaggctattttaaaagctgctccacccgggggtcgtggggagtgagaacagataacactgtggacacttccgggtgacctgagccac

SEQ ID NO: 672 - DNA, 618 bp, Rattus norvegicus
  Genbank Accession No. AI103983
gaaacagatagtaacattttttattaaatattacagtggatcaaaaagtacaaaatatctcttgcctgctatgtgactgggaaactattggcacagaatacagtatcaaaagcagtaataagtacaatttggaaaacatacaaagttgagtgtttattgttggctcagcattcttctggtagtgtttaaaactaaacgccaaggctacccaataacctctccattgggaaattatataacatcactgggccaggttgctatatacaaatatcaccttacagagcatcaaggttacagagctggggttactcagagtgtacaatatttacagcatggggaggtttaaaaaagtataaacagccaagagattacgctgctattttttttttcagagtcctttccgccaaggggagacgagcagaatatcaatacatcgacagtcaacaccagagtggaggtgctcaaagtccctactccagcggtgtgggtctcactggggcaaaaccattcccgttactttctcagctcgggataatgagtcagatcagaccccacaggacttggctggccaccaccaaatgtaacttagtgggacaacacgagaagagagataaatgg

SEQ ID NO: 673 - DNA, 472 bp, Rattus norvegicus
  Genbank Accession No. AI179601
ctcagaacggcatatcaacgtatttattcacagccttgttacaagtgtacgtccatctgtggagttttgacacactttaagtcacccatgcctcttaagatccaatttccaaatcatcgaggacatccttaagccactctgtgctcccgcgtgtcgttctggaagttatccgtcagcttcagacacctaccttgtgacttggatgtccgcgccatttccgcccagttgtgcgcctgggcatgcggcggagatctacgtcgcaaacggagctcggcttccacaccgacccacttcacgcggggtccggcgggccgtgctcctcacgcggccaccgagttagggccatcccccgatttcccgggaaggggacgtaggccaaagtctaccgcggacacgctagatagcaggccacagccacctcccaagccccagctaccaggaaacccatactacgcgccgcgtgcctcgtgcc

SEQ ID NO: 674 - DNA, 484 bp, Rattus norvegicus
  Genbank Accession No. AI104848
cagagttgaacagtttcatctttattggagatgaatatgttaaaaacagacctaaaagcccagtgttgagacagtcatgagtggcgtaaaaaagaggttgcctaggacttgaggtcctataaaaaatatcaagtgtttggaaaaggcttagcacccttgtggcagacatgagccaccatcctgttggttttccttaacagtctcactttgtagcagataaggaaacaggcttgtgggcctcctagtacaagatgacgacttcctctggccagagacttagtcttccaaccacagtcccaggagcttcagtgtcacattaaataggtaaggacttgactgacagcaacggactccaccctccaatgcgtgcaacagtgtcggcatcggaaccccatccctttgccactgtgcttaaaacgcaccagcgatcagctctctttaccttctcaatgctcagataatctgatttaaaaatgctcaaacc

SEQ ID NO: 675 - DNA, 533 bp, Rattus norvegicus
  Genbank Accession No. AA818655
tttttttttttttttttagagtcaaaacatttttattacttttttgtatcatttcgcacacttctgtacaaatacaagaataaaagcagtatttacaggtattgaaaagaactctggatatttaaactcagcacctaaacacagtagcttgaagcagggacttcaaggctctggtaggggagtaaatggtctttcctgcatgttgctctttgaagaattcccttagagctaaggtacttatacacagaatattaaataggaaaagcaatctcatttgcttgttttcagcacttcctccataagattattttacaagcatgaaataaacataatgccatctattttagggagcaaaattatagagtattctgtatttcttaaaaaacatttacagtcccaagttttaaaactaacttaagactaaatagaacaagaaaaataaggagtcctgctggttctttggggaagatttttctaacagatttatcacaaccccatgtggtgaagagcagtaaatattcactttttaaata

SEQ ID NO: 676 - DNA, 371 bp, Rattus norvegicus
  Genbank Accession No. AA859663
tttttttttttttttttaagagcttagaaaatttatttttttcttgaaatgacacacatgggcagggaggtaggacttggtgtaggttggtggaaaccgtgtcccccagcatcccagttttcctctcagttctttgatgagaggtctcctaaagactgggaggcggagcggagagctcccagttctaagcttggaatctaacttgaagtgcggagggtatggggatgtggtgggagccatgggactttgttctctggtaaaaccaaaaaatcaaaacaacaaaactccgagtcagctcggggatacttaatttgcatattggatgctgggtttcaggaaggatgttgtgtgttggtccttgcctcgtgccg

SEQ ID NO: 677 - DNA, 562 bp, Rattus norvegicus
  Genbank Accession No. AI178819
acccattaatcagatttattatcaattcaatttgaaggcaattttcaacctttaataagttatattcatatctgagattgtttaagctttctcatggagaaaaagaaaccaggcagcagctagagctgcaacccaagttttcttctgctcatccttaggcatttgtactgtgtggaccgagtgactggggccaggtcttctttctatgaaacagagtcttactgtgcagccctcgctggcctagaactcactgtgtagaccggctgctgcctcctaagatctgagatttggttgatattgtcctctagctgctctggctcgttactgggcagctgatgcacaatttcttctttgtaagatgccatggcttcttcatagagaacttgaaaaatctcacactgaatattatcttgtagtttcttctcgtgataaccccttgtttcaagtcgtttgtacaatataccattgtctgtcctcaacacgaacactatatggaaccagcgttcaggaaagaaatcacaaccgtggtaatcaacgatcacgccgccctctgtcatctgag

SEQ ID NO: 678 - DNA, 553 bp, Rattus norvegicus
  Genbank Accession No. AI230460
aaagggacaacatttattccttttccaaatgttacagtaaatccaggtggaagaatggttttagcagttagaaaaaaaaagtacaaatctggggtttggccattaaaagttatttacaacaatgggagggggggaaagacaacaaggagttgtttcacattacagacctccctcccgcctgaagcctaatacttgcttatcaagtcagagacacggtgatttcacaagctggaggtttgaacttgagtaagacatttataaaaacccagacaggggcaatgccctccccagcccaggtgccacagggcacagcacaagagactaagaattcaacaagggaaaggctggacgctcggggtttgggagtgtaagccccacttctggctcaggggcttgagaagcaggataaacaaaacgaacttggaaaagaattggaaacccagcagttgccttcagcggggatggggcttgggaaggagagaggcaggagcatttcacatcactaacctaacttgggaaccgtaagggaccatcttcaactggcctaatagta

SEQ ID NO: 679 - DNA, 387 bp, Rattus norvegicus
  Genbank Accession No. AA925342
tttttttttttttttttggagagacatgaggggaaagactttattcacactgggggaggccagttcccaaggctgccatcagaaatgcaccatcaccacagtaacagtgacccaccacactcaagcccacagcagtgtgcctctgttctgacagagtgccagatgtagacacaatccctaagaacttacttcatcagcttccaactcggcctcgcttctgctctcttttagcaccactacgacattctctggccttcttccttgaaatcatttcctaatgtatttttttactacagaaattgtagattaaaaacccttaaattgtcctttattggtgcctataggagtaagagatttgatggtttcctcctaagtcagcacaaagca

SEQ ID NO: 680 - DNA, 304 bp, Rattus norvegicus
  Genbank Accession No. AA965083
tttttttttttttttttgagtgtcgtcaaagctttatttacatgcggcatcctctcttttacaaactagattatggttttaaatggaatacacaggcaatatctacaaacgacacgggaaggacgcacctccaattccactgggaggggcgcattcccaaatcaaactggttttgatccttgagaagaaaggcggcagggctaattcatggcaacgtacggttagacaaggtcctcggtacccagaatgcagcatggtagtgtttgccacgcgcacattgaattctagttcgtgtggcgtagaa

SEQ ID NO: 681 - DNA, 451 bp, Rattus norvegicus
  Genbank Accession No. AA945643
  misc_feature (1)..(451): n = a or c or g or t
cactgttaagctctggcactttattgagcagctgtggaattagggaaaggaaagtgggacagagagacgattaagttcctaagggaaggtttcaagttgggctttgcagaaggtataattagtatggtccctgaatcctgtaagatgtgtgcctacttgatgctataacttgccaaaattggtgtcctttggtcgggagagataggggaaagggagttaagagccttgagaatttgcattcgttaacagggatgacctgtatctatctcacacggtgactttcacaatcccaccgtcctaccctatttccctgttcaccaggtccgagcctgctgtggccccctacacaggttccaagggagggaaactgacacccagtcggnggacttagcattgcaagtgaccagactcctggccggagggtggggggagcatgtgggaaaaggggagc

SEQ ID NO: 682 - DNA, 565 bp, Rattus norvegicus
  Genbank Accession No. AI175375
acatttgcatatcactgtattgtcacatgaaatgcgcatccctaagtgtctgacttggaaacgacctattaggtcacacagagtccggcccctgggggccaaagcagcttcagtgcccagagaccatggcaggaacctcctccaggtcttgctgtgggcacctgctttccccaggcctcagggctgggtgttgggaaaggcgagctcacatcccaggtcctctggcccctgggcaccagtttcccagattcaataggttcctggtaggttagaagctatttctgaagacaaggctcctgtggtcaaatacatttcggaaatgctgagctaaacaagacttcaatggctgggttttctataggacataccagtgcctttctaaatactctgcacttgtgaacatccactgtggggccagtgtgcaggacttcccaaaatgcactggatcacaaaagccttttcccaagaagtatcttgaaggctgggacctccaggcaccattgggagcgtgctaccctaaaatgtctgtgaccactgatagatcggctcctgtgttcctcgtgcc

SEQ ID NO: 683 - DNA, 347 bp, Rattus norvegicus
  Genbank Accession No. AI059707
tttttttttttttttttggacaaaaatatatatttttataaaaaactgatcacccaactttaatgatttcatacatggacttgagagtggtagtaaaggaacagacccaatcatgacaaggcgactgagggacagaaaatcaagttcctcagggagagaaagtataaagttagagagtgaagcacacttactcagccccatccatgccagtcctcccacagactacgctgggacacatgctctctgacagagaggctctcgtgccccctcgccccattaggagcgtatgtatcttcactggggaaaccgatcctgactgcctcgtctgaagtgctcttgcatcgctt

SEQ ID NO: 684 - DNA, 639 bp, Rattus norvegicus
  Genbank Accession No. AA944581
attttctagtatttattttgttcacctgcaaactgtagcaaaacatgatcagctttagccgcagacaggtgtcctccacatccttaaagaacttagccatgtacgaatagaagagctcttcagaaggaaaaattcaagaacgaatagaaccttccaatctgaattttccagaagcaatgtttcaaatgattttaatcattcatttcaagctagatgacagcaccttaaaagtggctgatctatttccccagtaacatttctcacataacaatgtgttaaagttacaaatactgatatgcacaaatagctaatttctaagaaaaatatgtacagtgctgcagcataatgaatgtgggatctgcaataacttaacgttagccaatttttaacttacatgatgccgctaccttttcctgccaattcacaagtgaaaagttgttgctgagccctctgttttgcacatattacctggtgtttaatacacaatgcaggcattttaaagacttctctcatgtttaaagctaaggtcagtgaaacaagacaacagtgcaagaggcgaggagatgtaatatgatgacataaaagttcgttccagtacagtgtctatataaggctataagaaaggattggttgatgagc

SEQ ID NO: 685 - DNA, 523 bp, Rattus norvegicus
  Genbank Accession No. AI136848
  misc_feature (1)..(523): n = a or c or g or t
tttttttttttttttttagactgattcaaacaatttactgtgacaattggcacggctgaggtcaaaggtggataggctgtggtcaaggactgatccccaaccatagacaggcttctgtgtcaaaaccgctctcccaggtaccacagttagcattaaggggtgcctanaggccacggaacacagcagggacctagtaccatgggctagaaagattctcatgcttagtcccctaaatgccatctcctttactctggaaggttctgcatgatggctccctgcagcctgccctgagtggacctctcctgactagattctgtatctagcagagactggctcagtcagagaataggtgttgcccataactggcttgaacaccgtttccaaagtgagtactgtccttagagacgctggtgcactgggctttaggtatgtagtcggtgtggagccactgcttctcatggcttctggcagctcaagagttctgaggaaactgctggaactctgggtgtggattaaccttctc

SEQ ID NO: 686 - DNA, 530 bp, Rattus norvegicus
  Genbank Accession No. AA874874
tttttttttttttttttcacacaaacacagagtgtatttttattacgtaaaacgttgcattggtgagcaacaattatttgtgtggagagctcagaaaggcacggcgaccagttgcctcattcatgattgcagccacgattttgcaccttccttctagtgggtcctgaagtctaagtggcagttaagcttgtaaatcctgtcggtttctattcaatcacaggaaagagtgcaggatgggcagtactctcttcagaatttacatctttagaacagttcgaatgctgtttcccgagtgcatcagatcaaaggctttgttaatctggtcgaaggacagattgccagtcacaaattcgtcaacttttacctttttggacatatattcagacaccagcttcgggacactctccacactcttccagcctccaaaggcagtgcctttccacgtgcgtcctgtcaccagttggaacggacgattggagatttcttcacctgaagcggccacaccaacatcagaatggtaaccctcgtgc

SEQ ID NO: 687 - DNA, 522 bp, Rattus norvegicus
  Genbank Accession No. AI070306
tttttttttttttttttccatatctgaagtattttatttgttcacatttatcctagtcgaggttcataactacttcatttgacagtttaaaaatcattctgtaaataaaataaaaaaaaatcacagctgggacagtaaagaaaggactcggtatgtaataaagaaaggagtgttggaaaataacatcggaacaagcaggggtaacgtggacatgatcgtgaggctgagagcggagcggaaagtctcccagcgtctgtaacgaacaaaaaccaagagcagtaaacagaaataagaattcaaagtgcaggcgtgcgagctttgatggccacgccccttcaggagccagaacatccattctgccatataaagtgacaggctctgctttaaacactacgtcatcttgcagaatccctttgcggcgaacgtaacctctatagtgacttaatgggaagttggtcatacgtgatatataatttctctacagaaaatatggaagtggtaaagactgttgttttaatttta

SEQ ID NO: 688 - DNA, 372 bp, Rattus norvegicus
  Genbank Accession No. AI012932
ccagatcaacgtttataaatatgtacagatcagttacaggcacttgaaatgtctttggctggaataacccaacattgcaagatcgtgtattcacagagtggccaggccctggccgattcagcaggcaatgatcatggttcttggtctctcagaaaatggggagctgtgggattaggcatcagccaaagccaccttctcagggcaaaattcaggattgctctgccgcagtttgctgggtctgcctttgataactgcatagcagaacatcgttatcaccatcacgaaaaggaagtaactggtgtgcatgagatgcaggtttattaaggagcggtcgtcatctgggacaatgacggtgagcttgggatttaaagc

SEQ ID NO: 689 - DNA, 653 bp, Rattus norvegicus
  Genbank Accession No. AI176007
attgttacaaccaatgtttatttacagaatataaatctcttcaaaaagatacattccttcatttaatcaatggtagaaagccttattaaacagaaataaagcctaagccgcactttatctcagaagaagattgcggcttcattgcaagttcatgaacacagaacacaaatgtacttcactcagcagctacgtcaatgaggctgttgattctcactggcaatgccattttatacatggaacaaatcttacttaaattaacagtagtaaaaattaaacttcaaacataaaaatatgtaacaacgaaggaaagagcaggaagtacgtctgctagcaaacaggatacgcaagttctccgcactcagacactcggtgaggcgtagggaaacctagctctgagtctctggccaggaagcctgtagttccaatcggatgggctttcctgctccactttcacaaacggctcaagagacaatgtggtgttttcagttctataactacctagtgttttattaaaacttactgaagggatctaaaggacctccatgggtaagacaaccaaaagatgaaattataactattttaaagggtatttttgcaagtacatacgccatataatgcacaacggacaaagatgtgttggtggtaccatcatg

SEQ ID NO: 690 - DNA, 668 bp, Rattus norvegicus
  Genbank Accession No. AI172281
gacatgacagaagcgtgcatttaattcgatgctttgcagagatacatgaccaaagttgtgtgtgtgtggcttgtcctttgggatggcctgggttatttatttctcagtaagaaacaccagtggagcaaacaactgcaattaagaaaaaaagtcttgatatacaagggaacctatgtgttttgggttaagacacatgcaagtattaaacaatattctaaatacaatatgagaggaacagttaaagaccctgaaatcatgatctgtctctcagaaataggatgtttaacagttctgtgttcacaaatggcatggattctttatttctaaagaatgttatagaaagaattatagcaccatcattaaaagtaataattttagccctgcctatctccagtcttggaatatcaacagaagcatagtacctttcaacacctaaaaagaataaacaaaaacaggaaatccatcccaacttgtagagatgaggtagctcatgctaaaaactgttgggtcatattttcttatgaatgttctaattttatttgagtgatcatcaaaactctgggcttctcgatcttttctttgtgatagcttcaggaaatgagacgtgcctgtgggagagtctcagcattcattactgtgtatgtgtattagaaaactgtgtgggcaac

SEQ ID NO: 691 - DNA, 529 bp, Rattus norvegicus
  Genbank Accession No. AA892273
  misc_feature (1)..(520): n = a or c or g or t
caaacattcaagaacagttcatttctatgtgatgtaaactcttccataaagtaagacaagaggcaacagtcccccgctcagaggtacgcagaccaaaaggaccattcaggaccatcttagaaacctctttagaaatcttactaaaaacaaaggcactcatatacaagaatgttcatagcagcattgtgtataagaacagaaacctgcaaacagcccaaatgttattcagcaggtgagtggctacctaagttgttttgtctgcttggtggagtattatacagatggaaatgaacaagttatagcaatcacaacgtacaggagtcttacaaacaatggttaagtgcaaaaaagcaaacctcaaggaacagagtacaacatttttgtaaagctaaaagtacaagcaatacannataatacattcctaaaggatatatacacacatgggcaatattattataacaagtgattaatgagcataaaattaaagacagtggctacctctaggaagaggctgggcaaggggacaaaa

SEQ ID NO: 692 - DNA, 582 bp, Rattus norvegicus
  Genbank Accession No. AA893164
aaacaaatggacacacatttatttataaatctgtttatttataaaagtaaatggataagatgttatctgtcattaaataaataattttcatatgcgctttgcagatccacagactggtcctccaacctgtactgcggttacagctgatggactttggcttgtccccatggaagagttaaccttttccttccatacacagccacatgccctcagcagagccaaggtagaagggtactgagctgacacacagtaagaaccaacatgtgagactgactgtctcctcaaggggtgcttgaagggagaaggcattggagaggctcagcacggtgattccaggtgatggaaggagccacagttgtccctggcccttcatggagggttatcagcaccttgggtagctgggtaagagacaaccttctctcctggaaaggagttagacgaaagtgaaccctctccttgttggagagagctcaaaagggccaggagctctgtctcagaggctgcaagagcaagatgtaacctttctaaggtcaattccctgagcatcgtgaatcagacttacttcttggagaaggcttgcca

SEQ ID NO: 693 - DNA, 410 bp, Rattus norvegicus
  Genbank Accession No. AI044628
tttttttttttttttttcagtggtaagtcatttatttttaagcaataataatctagtattcactcaggatcctgtacttaccgagacaatgttgtttttccagaaccggggaggcctcgcagaagaataagtaatttctgcaacttatttaacctgtcctcttgaaagcactggttcacaaacctgtctgcttcattatgcatgtccatggaaggatcttgccagcactctctgatttcacagaaaccattcttcacactgtcatcttgtacaccatagccatttccaaaggggtggacattgccaggcacatcatagttagcatactcatcgttctgatccaaagtcaaacagctccagccgtcctgataactgtctatgttacacccactctgcaaccgaacgtcatc

SEQ ID NO: 694 - DNA, 498 bp, Rattus norvegicus
  Genbank Accession No. AA894029
cagcatcaaagcaagctttaatagttatttctaaaaattgtctccagatcatcttctaccccagactattcatatacaatggctgcaagaattcaaattccataaacatgatactgcaaaagcggaaaaacccaggaaaatcgtttctagacttatattctcattttatatttgttactaaagacagatctcagtatctgttactaaattctaagaactaactgtggagagagttgtgctggcagctggtggctgggagccaggaacttgggaggaaaaagaaggaagttctcaaacaagaagcacatgcgcactgcactcattttccatctcataaccagaataactcagtgtagatctctattttgggaactatgttgatatcaactattgcctgcttatgggatccttttcctcctactgggttgcctcatccagacttgataagagggtttgtgcctgttcttattgcatcttgttatgctgtgttcagctgat

SEQ ID NO: 695 - DNA, 642 bp, Rattus norvegicus
  Genbank Accession No. AA943737
aaaaaaatcagtttattaatgtttaaaagttgataaagctatgtgcaaaatgacacaccaaagtcaggaacctattaaatactattttttttttaaaaaaaagacatttcttggtttaattgcactgaaaacaatactaaaaagacagtaatatatttttattctctgtatcatttacatccagggtcaatacctaaggacaactgaagaaaagaatttctgatgttccctgtcagttaaagtaatgcttttttgggtacaaagggaggcattttcttaagaactacacattcaatggtgttaacacaggttaggaagaaattcaataaaatgacctcaaagaagcaagtacattcgaaaatcagaaactgctctttaaacaaaatacaaccagttggttgacacagatcacacaacactctgaaataaccaataaaagtgccaaagatgctcgtaggggttagagaaagacatcaagcaacagctcttgttttacacaagtaaccctcagatttcacctcattttttttctttacccatatctcctaagatcctggtcaatataattacaaatagagtagacttcgttacttccattacaaacacatgtccaatgtggttgtaatggaaataaggaacaca

SEQ ID NO: 696 - DNA, 488 bp, Rattus norvegicus
  Genbank Accession No. AA900974
  misc_feature (1)..(488): n = a or c or g or t
tttttttttttttttttggtatttcccaaagctggttttaatttccaaaaattatgaggtctcttcccacactggggataataggatgggatagcccagactattatcccagtccaacccccagcctagcccaaacaccattgctgtctctgggtcccgtcatttcaccactgggagcttatttctaactccctcactggccaagacaggtggatggatgtgaagtttccaggactcagcactgtctctccaaagtgaccctgggtctcctctgtgaggggaagccatctgtgtcacgtcaaagtggattggtgtaaccaccaggctcaactcagccaagcacatacaccaaatgtctgaacctgcggttcctctcgtactgagcaggattaccatggcaacaacacatcatcagtanggtaaaactaacctgtctcacgacggtctaaacccagctcacgttccctattagtgggtgaacaatccaa

SEQ ID NO: 697 - DNA, 605 bp, Rattus norvegicus
  Genbank Accession No. AI177059
cagatcctgaaggtttattgagacctctacttcccaccactcccagcccccagagttctctgctgcctctctcatgacaatccctagggaagtaggggaccaaattaagctgcttttccgtggctccttcagagtcgatgggcagcagctgtggtgagtgtggtcttggtgttgaattttgagggatgagtgaaggcagatgggtttgggctccatgatgctcacttaagggagttagttgatgagaccaaggtaggaagtattctgaggagagctgtgggagtgctggggtgtgactgtggccatgcctgagctgattggcaatgccataggtgctgtatttctctgtcgagggtagccctaaacagatgggtctgcagtaaggaattggctgaggtgggatgtataagctggcagctagaaggtagcttctggctttcagctgtcgtgaaagggtagaagcaacttggagttttatggatttcagctagatccaggctggaatggtttggccacagaaaagcctggagggcgctgacagcctaacctcaggtagagtgctacagagcctgcctgtatgtggggcagggatttgccagggcata

SEQ ID NO: 698 - DNA, 338 bp, Rattus norvegicus
  Genbank Accession No. AA848963
taggttctataaaaggactctttcctgagtagtacatacagcagcttagaaaatgtatcaccagtacaaagtaaatgtatccagaattgaataaaatgtagccaaaaactaataatcttttatgaacattttcataattctctatttgttttctttttttcattcttgatttttagctttgttctagtcttctgtcagtataaaatcccaaaagtgccttgacaagagatgacctgtgttctctgacaaaagagcagcaggcagtacaggaaacctgactcaggaaggcaggcctgaaaagcaaatgccctgggtctgaaagagagaggagagcaagc

SEQ ID NO: 699 - DNA, 416 bp, Rattus norvegicus
  Genbank Accession No. AA893939
acaaacaaaaataaatcccagagataatgaaataaacatattctctaaagtatcccatgctggtttctctgtccgagaatgtggtagagtccatgtttaagttcctggaacattcctggatgctatgaagtctccatcttgtaaccatgcttctccagctcagcgcgtaactgattggagaagtcgtcttctacattgtcatcatcccaattatcctcccagacatgtgcatcttcatcttcatctaagccggcccagtcttccgcgggaaactcctcgaactcgtcgtcctcttcaccacattctggataacaacaaaggaaacaacaggtcacatatcttacggaccatttcctcaccatcaaaaacatctggattcccctcagccagttacaggctagatgctcttgctgttt

SEQ ID NO: 700 - DNA, 527 bp, Rattus norvegicus
  Genbank Accession No. AI112141
tttttttttttttttttgatttaaaaaaaatcataggctcatgtccattttattaataatgtttctataatctcttgacattatacaagcagtttttacagttaagtttcacactgaagacaaatactatttggcttaaggaacagaaagctgagttacatccttcacgtcagacacatacttcaacagtttaagaaaaccttttatacttgcagggctttctttcttcagtaaagagaaattagtaagaattcaatgactctgtaggcagatggctcataatggaacttaaagccctgatccaagccaagcctacacagctgacaaagccaagggcagaaaacgcggagctctttagccctaacctgcacctgctgtgctccctgctttctcctattaaaggctaagcctctgttgaaatcactgaagattaggtgaagggaaaaacactcagaattactaacacgattgacccccgtgtctcatgctcctcaaactggagatacaccttccacagacagcaactg

SEQ ID NO: 701 - DNA, 496 bp, Rattus norvegicus
  Genbank Accession No. AA799294
atctgtgtagaccacaggcaggtgtttgtttctggcatggccacattccagatacaagaacgtagagagacccagcaaggcaccacaccctctcatggcagagagggagcagtggggcagggtgagggccagctaataaagcctcccctcccccccttaactttgttcatagggcaaatggctgacggaaggagaaggtgggtaggttgagagggtatgcgtcaagacttggggagaggtagcagatagccgtcttgaggctctgttttcaatgagtagtcctagtcgaccttaaccaaagctccatccgattgtattcttgccaaaacacaacagacacatgcacgaacatggggcgtaagcaataatgtcctctcgtgttctccacggctgctcgaaccaagtggctggttcatttggttgacactgattcgcctttaaccatgacggttcctgttttttatttcacagaaagccaataaaattgtttagctat

SEQ ID NO: 702 - DNA, 712 bp, Rattus norvegicus
  Genbank Accession No. AI170751
cagaaagaattaaaacatttattgggcataaatatattacatatacactacagatacagttaggtattacatatagcatagtatttgcaaaatctatacattaaaattgatatggcagttttaatacaatgtatatgaaataatctaaaatttacaagacaggaaacatatgattatttttttttctcctaaagttgaaaagcttggaatgtatgtccaacagtgaggtaaaacattttgtctttcaatttaaagaattgtgcaaggataacattcaaacacattctattagggcacttgtcaaatttgacacaaatactgaatgactgtagccaaagagacagggtcagaaaatgccaacatctcaagtgtgataagaacaaggcagataatatgcaaaatagccttttaaaaaagttttctttgtgaacattttctttgaggacagagggcagtttgcttcaggtgactggaatttcttgtgtcagggatgcagttgatgtacagagaagcatcagggcatcagaaagccattcactcattcctacgtacggcaaagggcacagagaaggccaatagaaagccattcactcattcctacgtacggcaaagggcacagagaaggtcaatagaacactttattgtattgttcctttgtaatggcaatatatatatagttatatatccatagcacatatacagatctgtgata

SEQ ID NO: 703 - DNA, 358 bp, Rattus norvegicus
  Genbank Accession No. AA900875
tttttttttttttttttgtaaagcaacccagttttattttggtttcagaggccacccggagcatggcttcactctgcagggtgtaaaaaccttccctccccgaggccagaggaccagggaaggtaggggtacagggagatggctccctagacccaattcgattaataggctgcacgagatagaaggtagaggcctgcaatggctcagattgggggaaaggggcggaaagagggcacagaattcaagaacatggaatccacaggctggttcagttccctccattagaacgctgaggcttgggtacgagaagcaagacccaaccgtcatccggcaggaggcagggcctggcctcgtgccg

SEQ ID NO: 704 - DNA, 480 bp, Rattus norvegicus
  Genbank Accession No. AA893280
gggtccaaaggtgatatttcttcacatggaaaaaaactaaattcaagccacacaagaacatgccttgagggaaacagtgatgaagcctgctcggaccacacaggagcagatgcccattcagagcagaggccgcatgaacaaatctttattcggaacagacagacgtttacagccaataagaacacaaaggccatggacaagactgtaagcgcacctgagctttaaggttctggtgaggtcctcacaaaactaacacactccacataccagccgggtaagaagaactcatgtgtcagggccagcgggggcacgaccataagtgagctgtgaatgaccataatgaggacctttgttcacactagctgcttttctaatctaatcaggttaatttcaatacagcaaataaccgataaaaaataaaaggtgccacctggtcagcaacatcatacactggtgacaagagaacgttactgagttgtg

SEQ ID NO: 705 - DNA, 619 bp, Rattus norvegicus
  Genbank Accession No. AI235282
cttgcgggcgctcactttatttttatttttttttttttttttttttttttttttccttttctttttttttccttttttacaattttatttataacaatatctgtgttatttagttgtaaaggaattcagcaaaaattattaaaacgttcacgtccccaaaatggggctgcccacttgcccttccttggtgtgccccaattcttcctggccctcaggggaggggagactgggggacagttaccaaagaatgtgttcagccctaggagccacagagggggcactggagaggcaaagacctgtctggaagggatactgagcatggccatcccagacgtgcccctaaaagtgggagctggggcttggggtgacttccctcaactaaaaaatactcctacctcagctagagccagatattccagacaggttcagagagaactccacctccccagaactaaccccaggaaaggaaagctgggacactggagccctgttgagtgtcttgtacaggctagaggctgtgccgccagattcccggggtaagggaacgtatgtggactccttcatacctttgagccacagagccctccctgccccctcaaggcagcatggggggagggga

SEQ ID NO: 706 - DNA, 535 bp, Rattus norvegicus
  Genbank Accession No. AI235094
  misc_feature (1)..(535): n = a or c or g or t
ggatcaaaaaaagtttattctgaatatttaatttaaaaaaatccatacctataaggtgtgctacagaattccagatgataattcatatagaaaacccaacctaacaacggaaaggcaaggattctacaggaaagctcatggggagaaaacgggcatcggtcctcatgtgtcccagaggtggggacgcatctacaaggacatgctgtgctgctcgcttgactgtgtataaccagtgtggcccagcctcctggtgtctcagacactttgaaagcatcttagggacagttgatcaaggatgctggggaggcacccaggtggatcagttcactcagtcctgtgttcagccacattaatctatcaactgactataattgaacatatttggcaaaaagaacacagctccccacagggagcatgtttctggaggcttgcanggagaaggtatctgtctgcccagccaggtggctgggcacacagctcactttggctgagcaggagtcatgagcaagttcaagactccctccccaagtcttcc

SEQ ID NO: 707 - DNA, 333 bp, Rattus norvegicus
  Genbank Accession No. AI638949
ttcagtattcacaggcctttaatgcacaacttcctggtcatactccatccctgccccaagctggcagggaaggatgaaaacccatgtaggccacaggatacactcaaggagggactggagtcaaactgaaccctgggcagggaggtcctggccccaggaaataagggagttgctggcttgggcaagctcagtgatggacacccggccccgctgtcggatgaaactggccacagcagccagttcctctggggttatgtaaatgaacttgccccggtcgtcaatcacacctgttagagtcccctccgtcagcaggtcctggatgcggtttatggc

SEQ ID NO: 708 - DNA, 487 bp, Rattus norvegicus
  Genbank Accession No. AA924578
tttttttttttttttttgaagcagagttaaatgtttatttaaaatattttaaatataaatttaagttacaggagtaagaggtgctcagggaaagagtaaggcacacctgagagctgaggtgtgggcttctcaaaggaaaaccgtccttaagtgtcttaacaattagttgtacacaggagttctgaagcctttggtattgcttgattggtttctaagtcccacccctaatctcttcccctttttgatagtaagagtaaaaggtggctccagaggtgccttggataggactgtgccctgataaaatgaaaccatgggtcataagtgtagcataggagtcttgagatatgcctttgactgtaaatgagttttctggcaaagttgtaggaaactgtatgtttatagccaggaaaggaaaaatggcatttatattttggccttaagcataactccttgctgctttaacattcctacttgaacctcgtgccga

SEQ ID NO: 709 - DNA, 1619 bp, Rattus norvegicus
  Genbank Accession No. U61729
ccaacacgttcatggtccttgccccgaaccttccagcagcagcctccgccgccgccccgtgacgcctgctccccgtcgtctgccgagccccgcgccatgactgtcgtctccgttccacagcgagatctcgctctgggcggccgctagcgccgttgggttcctcggggccctcccgatggtgagcccggccccgccgcccttgccgcgccttccggacccgcgcgctctgccacccaccctcttcctgccgcacttcctcggaggggacgggccgtgcctcgcccgcgcctcgcaccgctgcaccgtccagctgcagcttggtcccggccgctgccccacggcagcgcccaagaagcggcggaagaaaaaggtgcgggccagcccggccgggcagctcccaagccgcttccaccagtttcagcagcaccggccgagcctggagggtggccgcagcccggtgccggggccgatcgcagcgcaggaggagcggggtccaggggccactgccctgctatacagacagcccccactcgcgaaggaggttttaaaatcaaagatgggaaaatcggagaaaatttcccctccccatagccagcttgtgcatggtatacacttgtgtgaacaaccaaagataagcagacagaaaagcaaatttaacttgccactaaccaagatcacctctgcaaaaaggaatgaaaatgacttttggcaagattccgcttcctctgatagaatgcagaagcaggaaaaaaagcctctgaaaaatactgagaacattaagaataaccatttgaagaaatcagcatttctaacagaagggagccaaaaggaaaattacgccggagccaagttcagcgacccaccgtcccctagtgtcctcccaaagcctccgagtcactggatgggaagtaccactgagaatcccagccagagccgggagctgatggcagtgcacttgaaaacgctcctcaaagtgcagacctaggctccagtctgcagtgtgtattagacacagattcccccccatcctcggactgaaggaagtggatacggcagtggaaatttgccgtatcgcagcatccgacacaatgagcttatgtcacacaagcagcttgtattatattttgtattttgtaaatactgtataccatgtattatgtgtatattgttcatacttgagaggtacattatagttttgttatgaaagtatgtattttccctgcggatgtggtgggtgttttgtatatatacagtggagatattttaagtgggtgctaaggcacgtggaagactgtttatttgcacaggtactgacatttttttaagaacagctgtcaaatctcaaaagtgaagatctaaatgtgaacagtttacctaatgtactactgaagcttaagtctggcacaatcactgtaaacatggagtttgtgtttctctaaattgacttgacttttaatctgtaattactagaaagcttcctatttttaccaaacttgacttctggatatcagtatattgccattattgaaaagatttaaaacacctctaattttaaataccaacaaaattggttgtaatcaaattttaaatcaataataatttggcctcccccccttaaa

SEQ ID NO: 710 - DNA, 394 bp, Rattus norvegicus
  Genbank Accession No. AI030449
tttttttttttttttttacaataaaaataaatctttaaatgttttccagcttatttccctgttcctccgccttccccatgaggtactacttactatgcaagtcagtcaggtctgaaattctgaaattaaagttcaacatggtaaagacaaggaaggcgctctaccctcttgacctccagagactccacagagatagcaacagtaaaggcagcagagactgcctgggtcagactgtaagcagggagaagttgggaggaacagaaaggcagtaagaatgataggaaagaccactgatagactgcaccctgacttcttggagaggtcatggcctcacagttccaccagactgggaggcctggaacggcgagctcatctttttccagtcactagaaga

SEQ ID NO: 711 - DNA, 3003 bp, Rattus norvegicus
  Genbank Accession No. U57391
gcgcccgccccgagagggtagcagatagtccctcggagtctccgccccaggggcatgtggagggtgtccaccgattaggatcgggtccgagtgattgaccacggggcccggagggtccgaacctggagcgcagcctgcaccctccaccacccgcccttctggaatgtcagaactaagccaagaggcaggtgcaccggaaaattgtgactgagccttcttggcagaagagaaactgagtcaccagtccaggaaccgcagggctgttggcgctcacctcgagtcttctggctgctttcctatttgctccctgcaggctccccctgtcctcctcctggggcacatcatgaatggtgccccttccccagaggatggggttttcccttctccaccagcgctgccaccaccccctcccccaagttggcaagagttctgtgagtcccatgcgagggctgctgccctggatcttgctcgccgttttcgcctctatctggcctcccacccacaatatgcagagccgggagcagaggctgccttttctggccgttttgctgagctcttcctgcagcacttcgaagctgaggtggctcgggcctcgggctcactctccccacctgtcttggctccattgagccctggtgtggaaatcccaccatcacatgacctgtcccttgagagctgcagggtgggtgggcccctggcagtgttgggcccttctcgatcttctgaggacctggctggaccccttccttcctcagtctcttcctctacaacgtcctcaaagccgaagctcaagaaacgcttctccctccgctcggtgggtcgttcagtcagaggttctgtccgaggcatcctgcagtggcggggggctgttgaatctccctcccaagctgggcctctggagaccacatcaggtcctccagttctaggtggaaacagcaactccaactcctctggtggtgctgggacagttggtagggcattggccaacgatggcacatcccctggggagagatggactcatcgctttgagaggctaaggctaagtcgtggagggggaaccttgagagacggagcaggagtgatacagagagaagagctgctgagtttcatgggggctgaagaggctgcccctgacccagcaggagtaggtcgtggaggaggggcagctgggctgacctcgggaggaggagggcagcctcagtggcagaaatgtcgattactgctccggagtgaaggagaaggaggaggaggaagtcgcttggagttctttgtaccacccaaggcatcccggccccgtcttagcattccctgttctactattactgatgtccgcacagccacagccctggagatgcctgacagggagaacacgtttgtggttaaggtagaaggcccttcagagtacatcctggagacaactgatgcacttcatgtgaaggcctgggtgtctgacatccaagagtgcctaagcccaggaccctgccctgctatcagcccccgtcccatgacccttcccctggcccctgggacctccttcctcacaaaggataacacagagagcctggagttgccctgcctgaatcattcagagagtctgcctagccaggatcttcttctgggacccagcgagagtaacgaccgcctgtcgcagggagcttatggaggcctctcagaccggccgtcagcgtccttctcccctagttctgcctccattgctgcttcccattttgactcaatggaactgcttcctccagagttgccccctcggattcccattgaggaggggcctccagcagggacagttcatcccctctctaccccgtaccctcccctggatactcctgaagcagccacagggtcattcctctttcaaggggaggcagaggggggtgagggggaccagcccctctcaggctacccttggttccacggcatgctctctcggctcaaagctgcccagttagtgttagaaggaggtaccagctcccatggtgtcttcttggtacgccagagtgagacaagacgtggtgaatatgtcctcactttcaacttccagggcaaggctaagcacctgcgtttgtcactaaatgaggagggtcagtgccgggtccaacatctgtggttccagtccattttcgatatgcttgagcacttccgggtgcaccccatccctctggagtctggaggctccagtgatgttgtccttgtcagctatgtgccctcccagcggcagcaggaacggagcacctcccgtgatccaacccagccctctgaaccccctccatggacagatcccccacatcctggggcagaagaggcgtcgggggcgccagaagtggcggcagccacagccgcagcagccaaagagaggcaagagaaggagaaagcgggcggcggaggggtccaggaagagctggtccccatggctgagctggtccccatggctgaattggaagaggccatagcaccaggcactgaggctcagggtggtgctggctctagtggggacttggaggtgtccctaatggttcagctccagcagttaccactagggggcaacggagaagaagggggtcacccccgagccattaataaccagtactcatttgtctgagatacctgcccaccctccattttcctgctcccagccttaagttgtgagactgggctgggtaaggacacagaggaaagtgggagtcccctccctacatgcttcctgacccttgtcagccaagggtgtgtatgttggtacaagtagaggttcaagagcccagttaagtccccagttactacactacaggtgcccttgccccgaggccaaggacttgggctccattacctccctgaggggctcttatggtcagccccatccctgggggctgtttcccccactaataacccccaacccaagcaagggtgagggggaagggctgtcagttatattaaggttgttgttgttgttttaaaccaaatggaaaagcataaataaataaagggtttatc

SEQ ID NO: 712 - DNA, 509 bp, Rattus norvegicus
  Genbank Accession No. X51707
cctttcccctggctggcagcgcggaggccgcacgatgcctggagttactgtaaaagacgttaaccagcaggagttcgtcagagctctggcagccttcctcaaaaagtctgggaagctgaaagtccccgaatgggtggacacagtcaagttggccaaacataaagagcttgccccatatgatgagaactggttctacacacgagctgcttccacagcacggcacctgtacctccgtggtggtgcaggggttggttccatgaccaagatctacggaggacggcagagaaacggtgtcaggcccagccacttcagcagaggctctaagagtgtggcccgccgggtcctccaagccctggaggggctgaaaatggtggaaaaggaccaagatgggggccgcaagctaacacctcagggacagagagatctggacaggatcgccggacaggtggcagctgccaacaagaagcattagaacaaaggatgctgggttaataaattgcctcattcat

SEQ ID NO: 713 - DNA, 492 bp, Rattus norvegicus
  Genbank Accession No. AI169751
aggagggatgcagctgcagatggtggagcacgtcaggatcagaaaccagaatcctctatcaagtctggagacgaggagcattaagagcaatgatgacgacagtaacaatagtgataatgaccatgaggatgctgaggaccagggagctgatgttcaggcatttggcagtggatgcgtaagcctgggctccagtcatatcacccaccatcttccgatccctagacttcacagagtaggcatatgcaatgaagcccaggcagcagaagttcatgaagagcgtattgaacagggaccataccacatggtcaggcacagagacctctctgggcatgttgatcacggtagttctgacagaagccgatccgtggggtgcccccagttcagacacctcatattcttccttgattctttcgtagtttgggggttgtcccccagtggcagcgttcacgaaggcttgagaagtgtggttcatggtaccgagcaaaagcagca

SEQ ID NO: 714 - DNA, 339 bp, Rattus norvegicus
  Genbank Accession No. AA998888
tttttttttttttttttgggacacatgagttctttattgaaaaccaaccctgggggtggaggcccaaatgggtaacccaatggtctctgcgcaaatcctcaacatcccttggctcccgggcgtgcgccctggatcaaagtcggatcagtgcaaaccttctggcccgtccaaccgctcctcctccaaccctgtgttgccctcttccccgtccaaagtcacctcgtcaacctcttcaagctccatgctctcaaaacctggctccggccgtccaaccagctccaccttcgacattgccccgaccttgttgatcaactccttggcctgctggaggtaaaaagc

SEQ ID NO: 715 - DNA, 637 bp, Rattus norvegicus
  Genbank Accession No. AI169177
aataatgacaggcaatcaagtttattcgtgttcacagaacatactaggcgaccccagacagccgccctctgacaatccatggacccaagacttccagtcaggaagacatcaaaggccacagaccgtattcccaagggtctgccaaagtcttacaacagagtcgaagtgctggaaaatggagtgttacccctaaacctatgccccccgaccaagactaaactaatcctcccacaactctgtctcacggaccctataaatcgtaataaatatctgtgtcacagcaagggggcatatctcgcacccctgcataagttagaataaatattacatacacccctccttcacctaggaggatatacataaatacataaatattaattagacaccgagaagacctccgtccgtcaccagtgagcctagccaggacccacggtgcctcgggctcgccccaagaaccggcatcttggcggtagtgttctgagttagcgttgccttataagtcccagtttgggatacgttcttgcgcaccaggtacccctggtgcctctttgggttttttttccggactgtgacccatcgcgtttagaatgccgccgggtgttgctggagaaaagctttgagatccagagcatagtcc

SEQ ID NO: 716 - DNA, 485 bp, Rattus norvegicus
  Genbank Accession No. AI045026
tttttttttttttttttaaagttgcactgtctttattgtaaacttgcatagtacattgattgtgtacgcttttaagtatagcagggtagcccctatggtaccaccctcttgtgtggggcatttaacgctggtttactatgagtagggagccgggaccaaagtgctgcctgggaattaaaaagaaccgttatctgattacgcacaagtcagggagctgagggatctgagtccatctgagaatactgacaggagagactttaactgggttcaaaggaagcatatcaaaagggtacaggggactcggtgtcaggaaacaggaatcatgagcagcttgtggatggagaataaggagaaaggagacaggactcatgcctagtgtccaaaaccgagatgaatgacacctgccacaattgtgcccacagacagcactctgggtagcccagatgcacatctatggcgctaccatggctacagaaaagccacac

SEQ ID NO: 717 - DNA, 525 bp, Rattus norvegicus
  Genbank Accession No. AI231083
cgggacaatgagtgccctttatggaagcggatttattggtgttttgagagagaacatgggaaaagctgcgacacgtcgatgtgatgctgagtcccgttttaagtggcttctgggaacagtcacagactccaggagagcagagcgacggaatacagacgcagaggttacctaggatccccctcagggagtacgcttggcagagccgtgactccctttgtgtctttgcagatgtcaagcgaacagaccaccaacctgtgtatggaacaaatgtacgcatggtggcctgtgtgcagggaagggattttggtcagaccatgacaaaaaaggctatgaggaattaaactcaacaattctttgtgtctcagaacattttactggcaacactgactgtatcaaacagacattcctgggaatggtggattctcttcctatccccagagaagcatatcaggaaacagacacagaacagaggggggtactgtcttaccacgggatcagcacatcctcatgggggtaaatgcctgc

SEQ ID NO: 718 - DNA, 638 bp, Rattus norvegicus
  Genbank Accession No. AI231219
gtcaagtgtttatttatacctacaaaagaaaacaagatggtatcaaaaggacaatttacaaactaagaatagtagtaacatagctctgagcatcctatgccctaacatcacgcctacaattcaagtctcaatgacaggaatgtgttgagagaccagcaagggcattagcagagcactgatcccaagcaaaagccaccaacctttttagatgagaagtctgcacaatggattgttagggagcagcagcccacagctttatacctaagcccttccccctaagtgagtaaaccacagaaggcaatcaacccagcttcagggtttgcctgcacctgtgctgacaacggactgacaaggaggcagaagtcacttgcgctaagtaggaaaactgctagttttctgctgtacccaggccaaaagagcttatgaaatatgaaatgtgctatttatctggattctgcctctgctggagaggggacagaagcaacctagctactgcttcatccccggaggcagtaatagaaggggtgggtattttgaagagctacagtagcacagaacagcccatggtataatgcttaataaaaaataaatctgaatttggttgtagaaagtatcttttacaggctggtcagtgtcag

SEQ ID NO: 719 - DNA, 575 bp, Rattus norvegicus
  Genbank Accession No. AI102727
ctaaaaactgtaggctttttattcagttaagaggtagacagatgaacatggaaggctgtcccattgaatttgcccaaagttcccattccacttcattcacccatcccacactgccagaaatctcaaaagaataaccacaaccaccaggctttgtcttcctacttcttagcaacacgtccacgaactgtttgcaaagaagttactacaaacttaaattttcactgtgccaaagattctcggccctctaagaagttgtcacatgtcaacagaacctgccactagtgacagggagcagagtgccgtgactatttctatgagagactacaagggaagcttcagttacatgtttgttaaatccctgtgcacgctggggaagaagctggtgaggccaacaaagcagtatatgccatcaaatggctctgcttggctgtttaaaaagaatccacattaagttatctcacagacgacattaaaacataatggaattgatgcctgatacaaaagttgagaaatatgtacaggaagtcatagcccaagagaaaagggaccttagaatgaatcaatggaaacctggc

SEQ ID NO: 720 - DNA, 6335 bp, Rattus norvegicus
  Genbank Accession No. X53581
ggatcccggcccgcagcagctctctgctcccagaacccgtgagaaagagacctcaccgcctggtcaggtgggcactcctgaggctgcagagcggaagagaccaccaacactgcccacccctgcccacatccctggcccaagaggaaactgtataaggcctctgggttccgtgggggagggcccaggagcgtcaggacccctgcctgagacaccgccggaacctgagggaaacagaccggataaacagttctctgcacccaaatcccatgggagggagagctgaaccttcagagaggcagacaagccttggaaaccagaagagactgctctctgtacatacatctcggacgccagaggaaaacaccaaaggccatctggaaccctggtgcactgaagctcctggaaggggcggcacaggtcttcctggttgctgccgccacagagagcccttgggcagcaccccgcctggtgaactcaagacacaggcccacaggaacagctgaagacctgcagagaggaaaaactacacgcccgaaagcagaacactctgtccccataacggactgaaagagaggaaaacaggtctacagcactcctgacacacaggcttataggacagtctaaccactgtcagaaatagcagaacaaagtaacactagagataatctgatggtgagaggcaagcgcaggaacccaagcaacagaaaccaagactacatggcatcatcggagcccaattctcccaccaaaacaaacatggaatatccaaacacaccagaaaagcaagatctagtttcaaaatcatatttgatcatgatgctggaggacttcaagaaagacgtgaagaactcccttagagaacaagtagaagcctacagagaggaatcgcaaaaatccctgaaagaattccaggaaaacacaatcaaacagttgaaggaattaaaaatggaaatagaagcaatcaagaaagaacacatggaaacaaccctggatatagaaaaccaaaggaagagacaaggagccgtagatacaagcatcaccaacagaatacaagagatggaagagagaatctcaagagcagaagattccatagaaatcattgactcaactgtcaaagataatgtaaagcggaaaaagctactggtccaaaacatacaggaaatccaggactcaatgagaagatcaaacctaaggataataggtatagaagagagtgaagactcccagctcaaaggaccagtaaatgtcttcaacaaaatcatagaagaaaacttccctaacctaaaaaaagagatacccataggcatacaagaagcctacagaactccaaatagattggaccagaaaagaaacacctcccgtcacataatagtcaaaacaccaaacgcacaaaataaagaaagaatattaaaagcagtaagggaaaaaggtcaagtaacatataaaggcagacctatcagaatcacaccagacttctcgccagaaactatgaaggccagaagatcctggacagatgtcatacagaccctaagagaacacaaatgccagcccaggttactgtatcctgcaaaactctcaattaacatagatggagaaaccaagatattccatgacaaaaccaaatttacacaatatctttctacaaatccagcactacaaaggataataaatggtaaagcccaacataaggaggcaagctataccctagaagaagcaagaaactaatcgtcttggcaacaaaacaaagcgaatgaaagcacacaaacataacctcacatccaaatatgaatataacgggaagcaataatcactattccttaatatctctcaacataaatggccttaactccccaataaaaagacatagattaacaaactggatacgcaacgaggaccctgcattctgctgcctacaggaaacacacctcagagacaaagacagacattacctcagagtgaaaggctggaaaacaattttccaagcaaatggtcagaagaagcaagctggagtagccattctaatatcaaataaaatcaatttttaactaaaagtcatcaaaaaagataaggaaggacacttcatattcatcaaaggaaaaatccaccaagatgaactctcaatcctaaatatctatgccccaaatacaagggcacctacatatgtaaaagaaaccttactaaagctcaaaacacacattgcacctcacacaataatagtgggagatttcaacaccccactctcatcaatggacagatcatggaaacagaaattaaacagagatgtagacagactaagagaagtcatgagccaaagggacttaacggatatttatagaacattctatcctaaagcaaaaggatataccttcttctcagctcctcatggtactttctccaaaattgaccatataattggtcaaaaaacgggcctcaacaggtacagaaagatagaaataatcccatgcatgctatcggaccaccacggcctaaaactggtcttcaataacaatcaaggaagaatgcccatatatacttggaaactgaacaatgctctactcaatgataacctggtcaaggaagaaataaagaaagaaattaaaaactttttagaatttaatgaaaatgaaggtacaacatacccaaacttatgggacacaatgaaagctgtgctaagaggaaaactcatagcgctgagtgcctgcagaaagaaacaggaaagagcatatgtcagcagcttgacagcacacctaaaagctctagaacaaaaagaagcaaatacacccaggaggagtagaaggcaggaaataatcaaactcagagctgaaatcaaccaagtagaaacaaaaggaccatagaaagaatcaacagaaccaaaagttggttctttgagaaaatcaacaagatagataaacccttagccagactaatgagaggacacagagagtgtgtccaaattaacaaaatcagaaatgaaaagggagacataacaacagattcagaggaaattcaaaaaatcatcagatcttactataaaaacctatattcaacaaaacttgaaaatcttcaggaaatggacaattttctagacagataccaggtaccgaagttaaatcaggaacagataaaccagttaaacaaccccataactcctaaggaaatagaagcagtcattaaaggtctcccaaccaaaaagagcccaggtccagacgggtttagtgcagaattctatcaaaccttcatagaagacctcataccaatattatccaaactattccacaaaattgaaacagatggatcactaccgaataccttctacgaagccacaattactcttatacctaaaccacacaaagacacaacaaagaaagagaacttcagaccaatttcccttatgaatatcgacgcaaaaatactcaacaaaattctggcaaaccgaatccaagagcacatcaaaacaatcatccaccatgaccaagtaggcttcatcccaggcatgcagggatggtttaatatacggaaaaccatcaacgtgatccattatataaacaaactgaaagaacaaaaccacatgatcatttcattagacgctgagaaagcatttgacaaaattcaacaccccttcatgataaaagtcctggaaagaattggaattcaaggcccatacctgaacatagtaaaagccatatacagcaaaccagttgctaacattaaactaaatggagagaaacttgaagcaatcccactaaaatcagggactagacaaggctgcccactctctccctacttattcaatatagttcttgaagttctggccagagcaatcagacaacaaaaggaggtcaaggggatacagatcggaaaagaagaagtcaaaatatcactatttgcagatgatatgatagtatatttaagtgatcccaaacattccaccagagaactactaaagctgatagacaacttcagcaaagtggctaggtataaaattaactcaaataaatcagttgccttcctctatacaaaagagaaacaagccgagaaagaaattagggaaacgacacccttcataatagacccaaataatataaagtacctcggtgtgactttaacaaagcaagtaaaagatctgtacaataagaacttcaagacactgaagaaggaaattgaagaagacctcagaagatggaaagatctcccgtgctcatggattggcaggattaatatagtaaaaatggccattttaccaaaagcaatctacagattcaatgcaatccccatcaaaataccaatccaattcttcaaagagttagacagaacaatttgcaaattcatctggaataacaaaaaacccaggatagctaaagctatcctcaacaataaaaggacttcagggggaatcactatccctgaactcaagcagtattacagagcaatagtgataaaaactgcatggtattggtacagagacagacagatagaccaatggaatagaattgaagacccagaaatgaacccacacacctatggtcacttgatttttgacaaaggagccaaaaccatcaaatggaaaaaagatagcattttcagcaaatggtgctagttcaactggaggtcaacatgtagaagaatgaagatcgatccatgcttgtcaccctgtacaagcttaagtccaagtggatcaaggacctccacatcaaaccagacacactcaaactaatagaagaaaaactagggaagcatctggaacacatgggcactggaaaaaatttcctaaacaaaacaccatggcttacgctctaagatcaagaatcgacaaatgggatctcataaaactgcaaagcttctgtaaggcaaaggacactgtggttaggacaaaacggcaaccaacagattgggaaaatatctttaccaatcctacaacagatagaggccttatatccaaaatatacaaagaactcaagaagttagaccgcagggaaacaaataaccctattaaaaaatggggttcagagctaaacaaagaattcacagctgaggaatgccaaatggctgagaaacacctaaagaaatgttcaacatctttagtcataagggaaatgcaaatcaaaacaaccgtgagatttcacctcacaccagtgagaatggctatgatcaaaaactcaggggacaacagatgctggcgaggatgtggagaaagaggaacactcctccattgttggtgggattgcaaactggtacaaccattctggaaatcagtctggaggttcctcagaaaattggacattgaactgcctgaggatccagctatacctctcttgggcatatacccaaaagatgccccaacatataaaaaagacacgtgctccactatgttcattgcagccttatttataatagccagaagctggaaagaacccagatgcccttcaacagaggaatggatacagaaaatgtggtacatctacacaatggaatattactcagctatcaaaaacaacgagtttatgaaattcgtaggcaaatggttggaactggaaaatatcatcctgagtaagctaacccaatcacagaaagacatacatggtatgcactcattgataagtggctattagcccaaatgcttgaattaccctagatacctagaacaaatgaaactcaagacggatgatcaaaatgtgaatgcttcactccttctttaaaaggggaacaagaatacccttggcagggaagagagaggcaaagattaaaacagagaatgaaggaacacccattcagagcctgccccacatgtggcccatacatatacagccacccaattagacaagatggatgaagcaaagaagtgcagaccgacaggagccggatgtagatcgctcctgagagacacagccagaatacagcaaatacagaggcgaatgccagcagcaaaccactgaactgagaataggacccccgttgaaggaatcagagaaagaactggaagatcttgaaggggctcgagaccccatatgtacaacaatgctaagcaaccagagcttccagggactaagccactacctaaagactatacatggactgaccctggactctgacctcataggtagcaatgaatatcctagtaagagcaccagtggaaggagaagccctgggtcctgctaagactgaacccccagtgaactagactggtggggggagggcggcaatggggggagggttgggaggggaacaccataaggaaggggaggggggagggggatgtttgcccggataccgaaagggaataacatcgaaatgtatataagaatactcaagttaataaaaaaaaaaaaaaaaaaaga

SEQ ID NO: 721 - DNA, 524 bp, Rattus norvegicus
  Genbank Accession No. AA850244
  misc_feature (1)..(524): n = a or c or g or t
gtaaagccattcagatggataactatttaatttcttaaagacagttgtaaaggtctctctctgaggacaatgacttggtaaaactggggcacagccagtcccagacactggtcgtggctacagtggctttttgggctcaggatcaacacgcatcagagtagactgggccaacatgtggtggcgtgtgcaaacaggctgccctagaccagcccaggccctttgacagcacgtcctctgcaccaaggcccctcccttctggaagtggaaaacttcacaaggaaattggagccatcttttatcccagaagcctttgctgctgccagggcaagtgggctggtgtggactcttgtttggggatgtttggaggctgaggttatatcactccttagctagccaggcctttagtatctttgtaaaaagcatgtatttatagtgttttagattttttctaacttttgtattttacagcattgtnacccattgttaaagagccatgttccctcttcttataagcgccttctaat

SEQ ID NO: 722 - DNA, 536 bp, Rattus norvegicus
  Genbank Accession No. AA874982
tttttttttttttttttgttgaaaataaaaataaagcggactttattcagaagataaaggtggtggtatcagttttggttaataaagttgggctcaagtgttttaacaggtctttaatgccttcacagactggcatgccaatggcattctgaatgccaattacagatcgatgctatcaaagctgatggaatttggacttcttctaaagtcagactacacacatcttaaaatatgagtaaggagactgcttggttctgaacattagaacaccatactgagcaagtccctccacttctccagaccctaaggcaggagtacagttgcttctgacagctacatcttcaacatatcaacagagagggaggactggggtaactgagaaaaaaatgaaaagcaaaattaaccaatgtaattggtgcaggcagctgccacttgtggcaaacccaagtctatctgatgcccattttcttcacatttgcactgacatcttccaagcagacggtaactacattcttgaaggaatgtgccaagactca

SEQ ID NO: 723 - DNA, 321 bp, Rattus norvegicus
  Genbank Accession No. AI069939
tttttttttttttttttagtgaaacgtcttagtctttattgagaacatctcagtcctttgtctacatgtgacagcatttcatgctcagttccggctgggctcggtgtgaggaagctcatgcaggctgtaacatgtggtatatacataaatatacatacagagaacactgaggattgtatcttagcaacacgtttcttggctgaattacattcatgtaaagtgtccaaactctaaaatcaaattaaaagtacataacccaaagcctggaaaagctaacagcttttaggggcttattccgtgaacattcctcatactgtgctt

SEQ ID NO: 724 - DNA, 424 bp, Rattus norvegicus
  Genbank Accession No. AI234222
aaacaaatcctattcagtagctggaaaagtcaattttctgtggaatgacaggaattacatagaagcaagcaattttattctcctcaaatgtagcaataattttaatctgtacatacataaaacaaacagtgcaattataaaaccttgaaggtgacatgcatactttaaggtgcaatggggatgggggaggacattagcatctccaactttccttactgctgttcttttctaggtccttacgcacaagcccggagtcaggaaactccatctggaatgctgaattaaaggtggacttcctgaagtctgcatgtttattatcacaaacaaaatggaaacgacctcttagagcagtttggtaggaactagagtaacatggctgggcttttaagctggaaatggatgagatcagggatgcactttctgg

SEQ ID NO: 725 - DNA, 636 bp, Rattus norvegicus
  Genbank Accession No. AA944413
  misc_feature (1)..(636): n = a or c or g or t
ggaataagcttgaggccgcaatgttttttttttttttttttttttttgctgataagaattctttttatgttattcgaataaaaaatacattcatacagaaatataacaatctcgcaaaaaacaatttcaaataaaatcttgtaaaacaaaattttacaaaaatcttacaaagattctttagataacagggtgcttcaaaaaaaaaagaaataaagaaatttcactaatagaaattttttttttaaatttcaagcaaaagtttctgcttgattgaggctcagctgtcacctgaacagaatgtactcgcttattattaaaattacaggcattgacacatacggcacccagccccacccagtccaacaacatctatgtgtttcataagtgagacaagccagcacaagtcctccttctcttctgtttaccttcttacttaatggaattgttgtggataagcacacagcagggccaaaaaaaggagttttccaaaacccagcaaatcaagtgctaggattttgaattgccaaacaaaagtgcattttccccttaagcaaaacgaaaccagttccgtagagaaatgtattcgtcaggccagatacgacaaaacaacacaacaacaacaacaaganaaaaaca

SEQ ID NO: 726 - DNA, 499 bp, Rattus norvegicus
  Genbank Accession No. AI103572
gagacagacatggttacttttttatttgaagcaaaaaaaaaaaaaacccataagttttaataaatactgtggaaaacactgaccaaacaaacatacaaagtgacttcaacattaaaaaaaaaaagcaaaaaaagttctgctttataaccgttataacttattttctttttacaatatttaaatacagaaagcacttgccagcgattttgtaatactgcccaaagcatgacgctgtaccagtcagagcatatttgttggtaatgtctgagtttcatgggaaatgactgaaatggcattttcttgcagagacaaaacaaaatacttgtgaagacacagaactgggtgtcggaactaccttaatctccccttctgccccagtttaatggggacacagcttcaacacttcaaaaatgaagcgtcatcattgggggaaagaaaagcttgttttcaacaagcacggactataaaagatcaaaactgatttcttctctgaaaagaa

SEQ ID NO: 727 - DNA, 423 bp, Rattus norvegicus
  Genbank Accession No. AA925352
tttttttttttttttttaaatttcaaaatgatttattggattttaaaacaagatacaagaaattctgcctgcaagaaacgcacatccatcacatagtcatacaaaaactaaagatgaaatatcagaaaattatattctagaaaattaaatcagaaaccaagcaggagacttaaagacaaaatgttcagaaaatataaaaaacaaggtcactatatatcagcaaaaggaattgtactaggcagcttttcatcactgaaacaagtaactgaaagaaacaattttaaagaaggaaaggttgattttggctcacagtgtgagaactttcagcaaaggctagctttctccacagctctcacattggagtaaagcatgacagtggaggcaggtggcagaagcttattatttaatgacagagaagaagca

SEQ ID NO: 728 - DNA, 1374 bp, Rattus norvegicus
  Genbank Accession No. X80130
aggcctgccaccagcgccagcccagctgaacccagccgcccaaagcacgcctacagatcccacagaagctgtaccaggatgtgtgacgacgaggagaccacagctttggtgtgcgacaatggctccggactggtgaaggctggctttgcgggtgatgatgctcccagagctgtcttcccatccatcgtgggtcgcccacgccaccagggtgtcatggtaggtatggggcagaaagactcctatgtaggtgacgaggctcagagcaagcgaggcatcctgactctgaagtaccccatagagcacggcattatcaccaactgggacgacatggagaagatctggcaccacaccttctacaatgagctccgtgtggcccctgaggagcacccgaccctgctcactgaggccccactgaaccccaaggccaaccgtgagaagatgacacagatcatgtttgagaccttcaatgtgcctgccatgtatgtggccatccaggcggtgctgtccctgtacgcttctgggagaaccacaggcattgttctggattctggcgacggtgtgactcataacgtccccatctatgagggttatgccttaccccatgccatcatgcgtctggatctagctggtcgggacctcactgactaccttatgaagatcctcactgagcgcgggtactcctttgtcaccaccgctgaacgtgaaattgtccgagacatcaaagaaaaactgtgttatgtcgccctggattttgagaatgagatggccaccgctgcatcttcctcctctctggagaagagctacgaacttcccgatggccaggtcatcaccattggcaacgagcgtttccgctgtcctgagactctcttccagccctctttcattggtatggagtctgccggcattcacgaaactacttataacagcatcatgaagtgtgacatcgatatccgcaaagacctgtacgccaacaatgtcctgtctggaggcaccaccatgtaccctgggattgctgatcgtatgcaaaaggaaataactgcactggctcccagcaccatgaagattaagattattgctccccctgagcgtaaatactctgtctggattgggggctccatcctggcctctctgtctaccttccaacaaatgtggatcagcaagcaagagtacgatgaggccgggccctccattgtccaccgcaagtgcttctgaggcggctaccttacactcaggacgacagtattgtgcttggaatcctctgaggccctctcccatctcccatcagtcattgtacagtttgtttacacacgtgcagtttgtttgtgcttcaaatatttattgctttataaataaaccagaccaggacttgcaacc

SEQ ID NO: 729 - DNA, 443 bp, Rattus norvegicus
  Genbank Accession No. AI145095
tttttttttttttttttatttgcagctgaatgtttattgcagcactcccaagtgatcactgttggatgaataaggaaacaattcataaccaataaaaatgttgaactgccttttttacagtaattgtacactcattgtgcttagtctgtaaagttgtatcctcagctcacccataaccttcccagaatagaacactctgtcatacattaacatagagccttcaaaaggtatacacaaggctcaactctgcaggccataccagatgctgtcccatccactagacagtttaagagggacacagcaagggccatgcagaccccatctcaaacatcccagtactaatactctgtatttgcttcttgtgtctgctttttctgaacatcaccacatccagttttccttcgcaagaagtctcctctcactggccatgcatttctgctcca

SEQ ID NO: 730 - DNA, 522 bp, Rattus norvegicus
  Genbank Accession No. AA819646
tttttttttttttttttaccacctgcattctaatgcatttattgatgattattttcattaaacaatgttagctgagtttggatgattaaaaaatgactaatatttttggacaatgtgcatccttgtaacttacaggaatgatctcatcttttatcgtggcagtcatttttaagttgcaaaaacactagcaatgtgtattccaaacataacaatcacttctgtgttactcacttggtatgatatacaggccattactacatggctgtaaatgcctacagagtttagtacaaaagccaaggcaacgaggaaacttgcctatttctaatggatagtgttagtgggactctcagaggtgggtgtcagcaattggtatccttctgagctctacaatctgggaatcagtcaaggttcctccctcttggctcccttgaccagactcgttgtcactgacactgagaccagcaccagtttttaatgcaaatatcaggtcatcaaactcctgggactcctcatctgctatca

SEQ ID NO: 731 - DNA, 562 bp, Rattus norvegicus
  Genbank Accession No. AA817864
ttttttttttattttttgagttttattttcattttttttacaagaatataacatgctcaaacagaaaaacagggatttcgtacaccactgataaaggaacccagctccctttgttaacaataaataaatattaacacagtggggagtccccccacccccacccaccgacagccctcagtggttcgcaaggcttgctgaggtaaagtctggtagggaggaggcgcggtcgggcagcagctcccgttgagtttcttcagtacgggcaaacaaatcacagtaaataagaacagcaacaacagcagctgagacaatcagcacaacagaacaacatagtatacttaaaaggattttctcccggagaagcctcaagtgcagagaaaacaatgctggcaacctacatctccacagccatcttagtctctggtgctggaagtcccaacttggaatgtttgttcggtaagacttctctcctttgctcagttgtcggacatgaatgctggtcccggggcttgaagcctccttcctcccacctccctccttagacctcatccaaggaggcgca

SEQ ID NO: 732 - DNA, 1008 bp, Rattus norvegicus
  Genbank Accession No. S77900
  misc_feature (1)..(999): n = a or c or g or t
acacccaaagccaagatgtccagcaagagagccaaggccaagaccaccaagaagaggccccagagcgctacgtccaatgtcttcgctatgtttgaccagtcccagatccaggagtttaaggaggccttcaacatgattgatcagaaccgtgatggcttcattgacaaggaggacctacatgacatgctggcctccctggggaagaaccccacggatgagnacctggagggtatgatgaacgaggccccgggacctatcaacttcaccatgttcctcactatgtttggggagaagctgaacggcacagaccccgaggacgtgatccgcaatgcctttgcctgctttgatgaggaagcctcagggttcatccacgaggaccacctgcgggagctgctcaccaccatgggcgaccgattcacggatgaggaggtggacgagatgtaccgtgagcgcattgataagaagggcaacttcaactatgtggagttcactcgcatcctcaagcacggcgccaaggacaaagacgactaggctcttcttagctgtcccaatgcctacaccccatcccagtcacctcctcaacaacacatacactctaccctccccatgaggagttagggtcccggctcccagggcaggaaatgagccattaagacgcacagggtgaggctaggggttccaccacggacccaggcactagaggaagggccacagtggggaggtgagccaagggtggggccagctagcaccaaagtgaaggaagccactgaagatggccaccctcagccatgccctcccattccagggctaccctgaggaagaaaacacccatgttctggtgttggacactaattcccagcatccccacaaaggtacacacccattcaccatgtcccttcagaggatgacagtctgcacttcacctatggagttgtcccagcacacccagaatgcatagagggacgctgcctgagggacaaattctctaatacaaggctgagcacaaaa

SEQ ID NO: 733 - DNA, 497 bp, Rattus norvegicus
  Genbank Accession No. AI176276
actgtccagttattttcttaaaaaactttaatgcttgataaaataaaacaaaattttagtaccatagaaaccttctgacatgtatgatgacttatcaatatgtacaacttcaaaaccaaatgcttccagcacaagcgaagtcatgctgaacgtcccaactagaggcaagctgatgaagcttcctgtttgccgtgtgagccttggcttggaagaacttagacagttagaaatataaataaaaccttcaatgagaatcaccaaaaaaaaaaaaaaatgcttgtaaaaatgaaatccagtcgtctggatctgggaagtctgtcctgcttatcagataccagcaagcaaatgaaactccatgaacgtccaaatgtcagcggtccaggagaggtcctgcaggtgcacagttgatctatcagaaaccatggcttcctaggtggcccttaaggaatcatatgccatttttcaccagctcatgaactccgttctcacctcgtgcc

SEQ ID NO: 734 - DNA, 569 bp, Rattus norvegicus
  Genbank Accession No. AA891949
aagcagaaaaacgtttatttctatcaaattccatacaaatcaatcttcaagcaagataacaaaacaatcaattaatacaatgaatagttaggacagcacatacagaacagactctggattaagcacatacgccaaaatcatcttgaacaccaactgtcactgaaggaaagctgatgtgtcagctcccgggggacttaagccaacattgcattaaagactgccttgaacttggggggatcacagtgaaacgccatcacagctcaacatagtcccccagacatccgttcagctcagaaaacaaaattggcaaattcagtagtacaagttctcataaaactagagaagccttgagccccaccatttcttgcagttcacacaaagcccgggtttcccatttttcttcccttttcccgaatcccagagagaaggtgcagtactcttttcaaaggttttaaacaagagtcttttattgaaagatgttgtgcttcctacaattgtctgtcactagagggagtccatgtggagccgtgggcaatggcttactcacttaacctgtctctcacacccaa

SEQ ID NO: 735 - DNA, 539 bp, Rattus norvegicus
  Genbank Accession No. AI178971
tttttttttttcctacttttgctttattcaaagacaggtgcaagggagtgaagaagggcctggtcagaaggcaagaccgacaggaagtggcttaacggtacttggaagtcaacacagtgctcacagaggcaaagaatttgtccagagaggcgtgcatggcgggtgtgaaatccccagggtggtggctagccaaggtcaccagcaggcagtggctcaggaacttgaagttgacaggatccacacgcagtttgtgggcatgcaggtcgctcagagtggacagggcaccaggcaggtcatcgaggtggcttgcagcattggtcagggcatcagcaaccttcttgccgtgagccttgacctggtcggagccctcacttgtattaaagtgagggaagtaggtcttggaggaggggaagacaatgaacaacctccctatggtctctgcgccaatttcagcagcatggttaccaatcttcacccaggctttcttgatgttgtttttgtcttcttcagagagcaccatgattgcttcccctcgtgcc

SEQ ID NO: 736 - DNA, 3903 bp, Rattus norvegicus
  Genbank Accession No. U83119
aggaagcaagaaactaatcgtcttggcaacaaaacaaagagaatgaaagcacacaaacataacctcacatccaaatatgaatataaagggagcaataatcactattccttaatatctctcaatatcaatggcctcaactccccaataaaaagacatagattaacaaactggatacgcaatgaggaccctgcattctgctgcctacaggaaacacacctcagagacaaagacagacattacctcagagtgaaaggctggaaaacaactttccaagcaaatggtcagaagaagcaagctggagtagccattctaatatcaaataaaatcaatttccaactaaaagtcatcaaaaaagataaggaaggacacttcatattcatcaaaggaaaaatccaccaagatgaactctcaatcctaaatatctatgccccaaatacaagggcacctacatacgtaaaagaaaccttactaaagctcaaaacacacattgcacctcacacaataatagtgggagacttcaacaccccactctcatcaatggacagatcatggaaacagaaattaaacagtgatgtcgacagactaagagaagtcatgagccaaatggacttaacggatatttatagaacattctatcctaaagcaaaaggatataccttcttctcagctcctcatggtactttctccaaaattgaccatataattggtcaaaaaacgggcctcaacaggtacagaaagatagagataatcccatgcatgctatcggaccaccacggcctaaaactggtcttcaataacaataagggaagaatgcccacatatacgtggaaattgaacaatgctctactcaatgataacctggtcaaggaagaaataaagaaagaaattaaaaagtttttagaatttaatgaaaatgaagatacaacatactcaaacttatgggacacaatgaaagctgtgctaagaggaaaactcatagcgctgagtgcctgcagaaagaaacaggaaagagcatatgtcagcagcttgacaacacacctaaaagctctagaacaaaaagaagcaaatacgcccaggaggagtagaaggcaggaaataatcaaactcagagctgaaatcaaccaagtagaaacaaaaaggaccatagaaagaatcaacagaaccaaaagttggttctttgagaaaatcaacaagatagataaacccttagccagactaacgagaggacacagagagtgcgtccaaattaacaaaatcagaaatgaaaagggagacataactacagattcagaggaaattcaaaaaatcatcagatcttactataaaaacctatattcaacaaaatttgaaaatcttcaggaaatggacaatttcctagacagataccaggtatcgaagttaaatcaggaacagataaaccagttaaacaaccccataactcctaaggaaatagaagcagtcactaaaggtctcccaaccaaaaagagcccaggtccagacgggtttagtgcagaattctatcaaaccttcatagaagacctcataccaatattatccaaactattccacaaaattgaaacagatggagcactaccgaattccttctatgaagccacaattactcttatacctaaaccacacaaagacacgacaaagaaagagaacttcagaccaatttcccttatgaatatcaacgcaaaaatactcaataaaattctggcaaaccgaattcaagagcacatcaaaacaatcatccaccatgatcaagtaggcttcatcccaggcatgcagggatggtttaatatacggaaaaccatcaacgtgatccattatataaacaaactgaaagaacagaaccacatgatcatttcattagatgctgagaaagcatttgacaaaattcaacaccccttcatgataaaagtcctggaaagaataggaattcaaggcccatacctaaacatagtaaaagccatatacagcaaaccagttgctaacattaaactaaatggagagaaacttgaagcaatcccactaaaatcagggactagacaaggctgcccactctctccctacttattcaatatagttcttgaagttctagccagaccaatcagaaaacaaaaggagatcaaggggatacagatcggaaaagaagaggtcaaaatatcactatttgcagatgacatgatagtatatttaagtgatcccaaaagttccaccagagaacaactaaagctgataaacaacttcagcaaagtggctgggtataaaattaactcaaataaatcagttgccttcctctatacaaaagagaaacaagccgagaaagaaattagggaaacgacacccttcataatagacccaaataatataaagtacctcggtgtgactttaaccaagcaagtaaaagatctgtacaataagaacttcaagacactgaggaaagaaattgaagaagacctcagaagatggaaagatctcccatgctcatggattggcaggattaatatagtaaaaatggccattttaccaaaagcaatctacagattcaatgcaatccccatcaaaataccaatccaattcttcaaagagttagacagaacaatttgcaaattcatctggaataacaaaaaacccaggatagctaaagctatcctcaacaataaaaggacttcagggggaatcactatccctgaactcaagcagtattacagagcaatagtgataaaaactgcatggtattggtacagagacagacagatagaccaatggaatagaattgaagacccagaaatgaactcacacacctatggtcacttgatttttgacaaaggagccaaaaccatccaatggaaaaaagatagcattttcagcaaatggtgctggttcaactggagggcaacatgtagaagaatgcagatcgatccatgcttatcaccctgtacaaagcttaagtccaagtggatcaaggacctccacatcaaaccagacacactcaaactaatagaagaaaaactagggaagcatctggaacacatgggcactggaaaaaatttcctgaacaaaacaccaatggcttatgctctaagatcaagaattgacaaatgggatctcataaaactgcaaagcttctgtaaggcaaaggacactgtggttaggacaaaacggcaaccaacagattgggaaaagatctttaccaaccctacaacagatagaggccttatatccaaaatatacaaagaactcaagaagttagaccgcagggaaacaaataaccctattaaaaaatggggttcagagctaaacaaagaattcacagctgaggaatgccgaatggctgagaaacacctaaagaaatgttcaacatctttagtcataagggaaatgcaaatcaaaacaaccctgagatttcacctcacaccagtgagaatggctaagatcaaaaactcaggggacaacagatgctggcgaggatgtggagaaagaggaacactcctccattgttggtgggattgcaaactggtacaaccattctggaaatcagtctggaggatcctcagaaaattggacattgaactgcctgaggatccagctatacctctcttgggcatatacccaaaagatgccccaacatataaaaaagacacgtgctccactatgttcattgcagccttatttataatagccagaagctggaaagaacccagatgcccttcaacagaggaatggatacagaaaatgtggtacatctacacaatggaatattactcagctatcaaaaacaacgactttatgaaattcgtaggcaaatggctggaactggaaaatatcatcctgagtgagctaacccaaacacagaaagacatacatggtatgtactcactgatatgtggctattag

SEQ ID NO: 737 - DNA, 450 bp, Rattus norvegicus
  Genbank Accession No. AI228438
aaaattaataaaaatattttattgaatttcaggaacttggtactttttaaaaattccaaatctttgcacacagatcagcactctgcttactctggaactgcagatgcttggacttcacgattgtcacttctctccttgtatcacacagcatagaaaacccaagtcctgatgctccccaaccccttctgaactactacagctactctgaccagcccctcagcagaggacagggaagtggggtggggtgtgtatggagaccagctgctgtctgaatacattctgcagtgtgggggaatagctataccaagttatgccacacacattctggaatgcaccgtacccaggacacaggtgagtttccctttgagtactgtgtggttcaagccaacactgctgaggttatctagtccctgagggagctcagaagtttggtaaaggtcaaagagagac

SEQ ID NO: 738 - DNA, 459 bp, Rattus norvegicus
  Genbank Accession No. AA849939
acatcaatatcaacaacactactgatgaggactgaatgtataaggttggggctctcttgcaggaacctcagaattcaaaaagcagtttctaaggaagcaatgtggggaaaaatctacatctgaagtatttctgaaataaaaactgaaggccaagaaatcaaatttctggttgcgagatgacaaaacatctttctctttctgtttctctctctcaggatgcacaggtaggtatgcacaaacacacacacacacacacacacctatacacttcagaaaacaaggaaggtatcttaataaattatctggattcatatatgttattttagtctgtttcacttggaaaaacagaacaaaaacaaatgaatacaaaaccccaaaacacagaagctaccagttgagagtcacagactgatttccaactggcagtgtaatcttccaacaggaaaataacacctgtgt

SEQ ID NO: 739 - DNA, 550 bp, Rattus norvegicus
  Genbank Accession No. AA860024
tttttttttttttttttcaatgttcagtttcctttaatgacccccatctcccttgaaggataggtgcaggcagctaggtgactggcaagacatgttcacttgaagatcttgccttgattgacggctttgccaacgtgctggaaggccccctcccaggaaaagtactctcgaacgagggtctgggtctcctcgctaccaggatccagtttccgccatgtatatgactcatagtccacctgccaatctggactcagcggaaaggcaagatcttggcctcggaagacccaaaccccagaaatggagctgctgttgttggttccaaacaggataacactagcaaaggcattctttctcagtttgtccaatcgctgaaacatcccagtgatgaggttacagctcatgaaggtctgggtgagctcttcagggaagcggtactcagcataccacagggaccagccatccttatcaaaatgctcccaaaaatatggcagcgccacagagagggtgtcctcattggagtactttcgcttaaactcatccaacacaaagg

SEQ ID NO: 740 - DNA, 588 bp, Rattus norvegicus
  Genbank Accession No. AI105444
catgacacaaacatgcattcagttttattcacaaaacagcctggtctcctaaaacaatacaaacagcatgttcctcagcagggagctggccacgggcagggggcccctgggcacccacccctaccagcaggggaccacgaaaagaagccctttcttctgctgctgtgagcaaggctggaaaaagagggctcattttttctaggggaagtagccaggatcagaaatactgagatgtgggctccccaaatctcagcggatcaacaaatgaatagaattttcatctctccaaaaatccgtcactgttggggcgggggcgtcccagtcaggggacgatgggtgcgacatggtcgggcctgggtcaggaactcccagtcccagtgggctctggccgctctgcacacgtgaacggatacagagggggcttctacacggtgcgatcaacatttcctttataaacgtgagtggattctccaggcaaactatgcactatttcatggttggaaagaatcaaaggaagttaaaatcagagtggagttaaaactgtgctaaattacagtagtgcttattagtaactagattgcaaaaggt

SEQ ID NO: 741 - DNA, 505 bp, Rattus norvegicus
  Genbank Accession No. AI171374
tacttttacattgtctacaaccatggtgaacacattcccggtataaagacacagcctttcgagtttgagatgtccccaactatgagattacatatataaaaccgcataactatagatgaggtaatcaaagtaagatagttactatctaaaataaaataaaatggaaataatttactcataagattcatatttaaatcatctttatttacaaaatactatcctgagaattataattccattaagcttcaatttgagcaaaaatataatcaggtaagtaacggcagttacttaaactgaaagtgagaaggcaatgactgccgacagacccaacacggtcagctcaacatatctcccaggaaagtcttaggggattcacatggctcatccccacagtgtgtcctcagcacctgagacaggatagagatgtccctgatccaggccatagtgtacaaagtccattcattcagttgtgatttagaatatatatacaacctggatggcattc

SEQ ID NO: 742 - DNA, 415 bp, Rattus norvegicus
  Genbank Accession No. AI073176
tttttttttttttttaactttaagatttatttttgtaacttttgaaacagagaaaacaacacactcttgggggaaaggtgagggtagaggaacaggccctgggtagtgatcacagcacctggagtttgagaggcctgcctaggagagccacacgcactgccatacagcacaggggacagctactgtctgaggctccgcagaccagttcctgcgccacgcaaagctgctatagctccaagtcataaaaatcctccagctcatcgtgaaacaagtcccactcgtcctcagagtctgtcagctcgtcgtccccacctgcagccaaaagcataagcaacatctcgcccagctcaaaggtgacaacctcctcttcgtcgttgtcaaaggggttgttctctctctcctcaatgagctccca

SEQ ID NO: 743 - DNA, 597 bp, Rattus norvegicus
  Genbank Accession No. AI169640
ctctggattaagacctctttaatatacataatgtatagtacttcatataatttattaatgtcattttctataggacactgtaattaattcagtgacattaatattgacctcatacaaaggatgaaagctgggttttcttgtgtaccaagtacaaaacatgtgttaagaagttacatagacaacagttgcacgagatcaacttcaggatgactcggtttacagtagtcacttcacatggtttccatcaagacttggatgccacctggtgtagccaagtttgtgggacgacagctgtaggcctgactacctccttttgccagctccacttttgcctgttttactgctgccactacttgatttgccagaggattttgaagagaagagtcttgtcataaactcagagacatcaggcaattcatggttggaattcaacatgttcattgactgctccatctcccgtctcatgtcagggtcacttgtgttgaccactttgggcagaagcacaaatatcaataatgggagaaccatcatcataaccattgggttcatcaggaagtctgtccagccccatgattccctcttaataaagtaagaagg

SEQ ID NO: 744 - DNA, 556 bp, Rattus norvegicus
  Genbank Accession No. AA799803
gagattatagtaaaagagaatttattctatacactgtctgcctccgtgattttaatatgagaaacgtagtgcttatcaaaaattggttagatacttttttttttttaatatactacacactggattctaacccaatgaatgctggcttcagttttcatctccaatctctttcttgatccagtcaacataattcagtaacttggtgtaaaagccgtatccctcaccacacccaatgccccaggatacgatgcctgtagccacccagatatcacgactgcggtccctgactgcaaaaacacccccactgtccccctggcaggcgtcatgcttgagagttgggtccccagaacagaacatattttgagaaaatacatcattactgtttttcgtccggagccacctctggcatgcctctcgatcggctatgggcagacggacaaacctgagattaaaagctattttatcttctgttatcccgaagccgctgacataacccataaggtctttgtcataaaaggtctcattgtctgggagacagatggggaggaggttggga

SEQ ID NO: 745 - DNA, 575 bp, Rattus norvegicus
  Genbank Accession No. AI176554
tttgggtttcagaggaagaacaggtattgcattataaagacttgtttgaaatagtctgtcgccatcatttattgtaaacagacatgattattcagggagagaacaatacatttttttctgcatttcttccacacggtaagacagggtcccacatagcccaggttgaccctgaactcctgatcttcccacctccacctcccaaatggtaggattctaaacacactccaccatcctggtttatgtggtgacggaagccatggcttcaggcattctaagcaagcattcatccatctgagctgcatacccagtctatctcccacccactcttagaagagcatgaatttatgcccatttaagacactggcttcgctgaacctcattaccatgatgaggaaaaaaaaacctagaatctcaaagactagcagtgctttgtagctgtcatcatctcctggccacggcccaggaagtaagcatgataatgaactagggtagttcaactgacatactcgtgctgtgcattcaatctgctgagtcagtctgggattagcatcctggggaatatgacacacttcctg

SEQ ID NO: 746 - DNA, 504 bp, Rattus norvegicus
  Genbank Accession No. AA998172
tttttttttttttttttcccgtggaaaaacatttttttactgatagaatttaagaattaaaccaataagaaaaccaaccaaacaaacaagcaaataaacaagcatgtctagggattacctcagcggcagagcacttgcttagtatgtgctaagccccgggtttgattccagtactgtaaaatatatctatttatatataatatatataaaacgaaaacaagcatatacaccttaagataatataaaacttgaaataacatcaggcattatggaatgggaaacaattttgacaccacccccacctcctacaatacaaaggaaaacaacaggttgggggtatgatgacaagcagaactctggatgattaacattacacagaccctacatcacagaacaccacagagtgagttatacattagtaagatcgtcctgacggcagtgcaagtcctagatcaaaaatgagttaaaagtttgcggtgtaaataacccacctgtgaagagatg

SEQ ID NO: 747 - DNA, 417 bp, Rattus norvegicus
  Genbank Accession No. AA956596
tttttttttttttttttacttccaaattctttgtttattaaacttagtagacattaagttagtactttcatttttaataaaccccctcaagtatgcaccatgacttaaaatataatctaaatataaagcactctggtactccatgtctgctttcagttccatctaggttttctgtttctccccaacttgcctgcatgggtctttgtgagcaatagcacttggtgtttatagcaccggtggcaataatacaaaggaatgggtggccgtcccctcctcccttcctagggctgtgaagcagctcactctgaatgagatggctctggatctcacagccgggacagagccaagaaaatgtagagaggaagctgagtcaagtcagtaattctagtaacagggtgactccccatagactccacg

SEQ ID NO: 748 - DNA, 411 bp, Rattus norvegicus
  Genbank Accession No. AI059968
tttttttttttttttttgggtttgaaagttaattttattaaatgaagataatatatgaaatacattcatcatgactagaaaggtgtggccagatcatgtctcaggtctgtagcaaataatcttgactcatataaaagtaacttcaaaattccagtttctttaaatagttatgcacaaaacatacagatacacacatacacgtacagttcctaccactgtgggtcagaggtgccctctcccttcactgagctgccccccccccttcactgctcaaagacctgtgcaacggggttcgaccagatctgtctcctaaggatccgcctcgggctagcttagacttgcctgaggcttcagctccctagtcacacagggcgagtcccaaacactaggagaaatgttcgctcttcctta

SEQ ID NO: 749 - DNA, 462 bp, Rattus norvegicus
  Genbank Accession No. AA996499
tttttttttttttttttcaagccacagacacagatggggtcatttattccagaaagtacttaaagaaaccactgggccgtgtgcagagagacatcagtcctcagtgccctcggagccagcccctcccccagagtgctaaaaccccagccccttcactttgcagagtacagagagaagggatgcagggtggggccccgcaacagggagtgcaggagatggcagaacgtggggcagctacccagctcaggccgagggaaaaatgaggaatccactgaagatgctgtcggcttcagtaccctggtaaatgcggccctttgctgggtccttctcaatccacacctcgtcccctcgttgcaattgaagcacagtgccccctgctaacacctggaagagccccttgctgttggtgtcacagaaaccaagggaattcctgggctggccccgggaggaggacacgatagc

SEQ ID NO: 750 - DNA, 435 bp, Rattus norvegicus
  Genbank Accession No. AI230945
cactagaacaaaggaatgtttattacagcattgctaagctagcttcctccataaataaacctgtacagagtaggacataggactgtgatatatacagaggggcagaggacacagcattcgagccaggatctgtccccatctccaggctcagtgttctaccattttcaagtatattagcaaggccgctcacatctgataggcatttccaaggagtagaatggattcttgagggcaaagtctgagtaaatttcataaatttttcggagaagagaatctattccagcttgcctaggatctgccaggaccacaaacttgatccctgtcagtgtttggaagcagtgcagtttgaacgtgtctgtttccagcatctcaatgcctgaactgccctgttccggagatagctgggaaccaatggcaaagagcgagcctcgtgcc

SEQ ID NO: 751 - DNA, 572 bp, Rattus norvegicus
  Genbank Accession No. AA818101
tttttttttttttttttaaagttagcattaaaaaaataaatttattttaagtatgaaataatgaagaacaggcacatagagaaattataaaaaatagcaaaaataagaacagggatgatgacatgagacacaggtgccgttccagttactgcataaacattttcaatgctattcctccgatatcctcaaaacaaaagcatttacagatgcagcagcttctgactaaagcagacacaggcggtgacaactgctacttctaaacctacacacagaattgtatcaaagtcttccctaatacattaccacttaaaacactgagaatatcatcaattctttttgcatttttacatcacactttgtccctgttccaaacaatgaaagacaaaacaagaatatacttcagacattaagtattccaactcgcatctgtaacttgttcaaagcgtcaggagctaacatgtccatgatcaccataaacaacactgtcaatttaaaaatagaaacagctgggggagacagtgcatttttggtcctttgtaacctctgacatcaacaccgcctcgtgccgaatt

SEQ ID NO: 752 - DNA, 459 bp, Rattus norvegicus
  Genbank Accession No. AI104132
agatggcaaaagacattcaagtttattctctgaagctggttgtcagggaggaaaggctgaagggtcctggttgggggaggacgagtctttaggcccctgatgcccacagactggtgaggaaggtgagcaggagaactacgttaccaaatttgctccagcctgcagggaatccggccccatttccctggggctggttagccttgccacccttagacaagtgagccccatcactctgaggatgagtaaccttgacaacctgggggtggctaaacctgtcaccttgaggatgtctggtcccaaccttcaaggggctgtctgcccgggcaaccaaagggttgtggatttgggggctctgccagggtggaatattgcagagtgtggactggcaacaggtctgggtcatttgggtgctgtccactgtcttcacgatgggctggcaggtaacagtacaccacatgg

SEQ ID NO: 753 - DNA, 393 bp, Rattus norvegicus
  Genbank Accession No. AA892400
aaggatggaaactgtttatttatgggtaaagaatagctgagagaacacttgaatttgatgaagctgtgccactttgcaggtcgggttggtttatcatcaaaaggtccaaaataaaagttacttcacagaaaggaggaggaagcaataagttaatgcataataagcgcttttacaagcatactttataggaaggagattcataattatagccaatatattctagacagtaactttgactatttcacaagaacataaaattactgagtatggaatgggtgcagacacgaccatgacgaagaaggcatatgttgtgtacctgccatgatcacagctcctaagctttgaactacattttgctgtgggacacaagaacataagattttctctaggagt

SEQ ID NO: 754 - DNA, 312 bp, Rattus norvegicus
  Genbank Accession No. AI112636
tttttttttttttttttgcattatgaaaaaatagatttattgcccaggagttgcagaaacgtctcccgagcagaaaggcacgggtctcaggccctccctaggcgcttcttgatgaaatggcccaccagccgctgcggcctttgctggtattccacaagcacattatggggagtgttgatctgatccccttgcagacggtccagaagagtgacacacaccacagccgctttcaggccacaggcactgcacatggtggcaaacactgaagattccatctcgatatttcggacacccgcggcatgggctgcacgc

SEQ ID NO: 755 - DNA, 362 bp, Rattus norvegicus
  Genbank Accession No. AI013197
gagaggaatgtacagcatttaaagctctgaagcaggaattgaagcaggaactgaagcttagggcaggggagtactgggaagtgcccaaggacataaggtgaatcattaaactgaaagaccccagcttagcagcagtaacgccattttgcaaggctgtacttaagatgactggttcagggaaaggttagaacactgagtacacagcggctgccaagcaagatatgtttggttgaaggcctggcaacaggacgacttcggttgagcacctgacaatgaaaaaaagccccaggagaggtcccacaccctggtggggggccgagtcagtcgttatgttccaagaaggtagctaagaaacttgcccc

SEQ ID NO: 756 - DNA, 684 bp, Rattus norvegicus
  Genbank Accession No. AI171652
ggccataacaaacaaacaacatgaggtttaatcaagcacaggagaaaaaacgatacattcaacagatgtggtatacagaagatgaggctgctgctggcttgttgttgaaacaccatgtgagtatactctcctatgaaaggtaagtaggaaaatgacttggaatattctgatctgtcttcatacaggaatattgatggagagcaaaagagcataatcaaaggcagcagtcaactctgaatggacctgctgtcctctggctgtaggccagcaagtagcactgccatcttctagcttaagaacaaagctcagcagtctacgggaaataggcacttacacaaaagtttttaaaacaggagtttttgacacttgaaggatttcattccaaactctcaattatataattacaaaaaaatccatgtttcacgaaaatatcctaaccctaacataaaattcagatcacttaccacaaagttagacaaatgtataaggaaacagaacagaaagcatatttacaaatttagactacatgagacattgtgaagaatctttaacaacactctacgtacttttacaaaccacatttaaaatgaggaatctgtaaatgatgtgagaaaggtcatagcgtgagaactctaacttttaaagtccaaagttatgttgaagattttaaaagtaatgatgaaa

SEQ ID NO: 757 - DNA, 602 bp, Rattus norvegicus
  Genbank Accession No. AI172193
caggcttaatatactttattgtaagcattagtgaactttttgattaagaactcagccagttgtgttctcagcaagatgccctaggtgggccctgactacatctggctttatgccagactgtgctggatttgccacaccataggtcagagagggtgtggcagacatctagtgctcatgattagagcttggaggtgctctgctcggcttctcaggtccccaggagcttcagtagcctgcattggaagcgagagtcttcaggatgtgtcttcaacacttggtacacctctacggggggcttcaagcccatctgctctgcccgatgccagcgctgcagccttgtgatacctgtgcaaggcccatactgccaggccaggtcaaactgcctcagcaactccagctctgtttcctcctggctgagggactgggtgtcttcccctagctcgggtgccagctcccccttgttgtgcccagggggcccctccctcttcttcacaacagggtaggagtctgtgatgaaccgcttccgacccatggcggccacccaggcaggcggagcaggaggcaaagaaaaggcagggcagcgggcctgtgagagacagctg

SEQ ID NO: 758 - DNA, 607 bp, Rattus norvegicus
  Genbank Accession No. AI045807
tttttttttttttttttgatggcttacttgattttactataattgagacagtaaggtcagaaaactcaaataaagcagaaaatacacatttaaaaataaacattttgtttttgcttacaattttactttttttatgattaatacaggcaacatggttcttagtcttagttttacttttgtctataaaaataaaatctttaatcattcctgttatttgtttttccaataaagcaactgttaccattttaaatggcagtgagtaactgaataagagttaaaaaaatcagtggcacaaattacatacacacaagatgatgtaaccgatacagtgttaagtaagcagttaagtacagtacagtactagctgtatctaagaggtagaattcttactcacagtcttacagaaaagacacagtggattccgcttcatcactgatggtacctatagcctgcttctcttgtacttaaagtagggaagacaggatttttgggcaatgatctcattgacctctgttctgcatctattgtaggagcttggcttggataatgggatattttcttggtcagttattgatcatataatagtacttatctcacattttgaaaa

SEQ ID NO: 759 - DNA, 531 bp, Rattus norvegicus
  Genbank Accession No. AI009467
aagcaaggaaacatttatttactacactcacacagtaatcatcaagcatcctgatgtttgcccaggtagcttaaaatagcaaatattcagtccccgcagaagaactgtcttcggttttaagccaagtcaaagaacagaaaggaaaactcatcactgctgagcactggcgctcaggctccactctcggatctgggacgaagaaacacaatcccaagtcagcttcctttctactcggcgtcactcagttaccagtcacggaacacaagctaaggtcctagcagcttatctgagacaagtttaactaactctaagatcacatgacttgacaagaaatgtacaaatgtttgctaagaacttaccgttctgtcaatcattttaaagagtccatgaaatatacatagcagtatttttgtaaccagaaactacactaattagacacatcatttagtttgttaagttctacctgaaaacatgccattttaagtaaaatcctaaacacataactcttaagttctatggtttaacaatcaa

SEQ ID NO: 760 - DNA, 544 bp, Rattus norvegicus
  Genbank Accession No. AA818747
tttttttttttttttttgggttttacattcgaatacagaactttattaggaaaaattgtaggtgaagatacatcatttttcattgatatgacttcaaagtagaaatggcctctcaaataactgtcatatattaaaaacgagaataagaaagcacacactgcgtataggaagctgccttctcctggaccattttcacattatctgggagacagaactgaaacaaaatacagtattcaccacatgcaacactgaaaccatcgctgcgtagacactgcaagctctgcggaggaatgacttctgtgaggaagcccctggtgacgccgccgagataatcacccatgagaagataaacagaactcgatggagaggcctaaaggcctcatgccaagtcccacagaggaatgcagccttttgctctccaaaccctccctcaaagccgaccaagcaatgaatcagaggggtctgccacctcggctgcacttccttcccactgtccccgaatagcaagcagcacagtgtaaacacaaggtacaaatctgggttt

SEQ ID NO: 761 - DNA, 370 bp, Rattus norvegicus
  Genbank Accession No. AI176456
caagtcaagtttttttattttattgtcagttacatgctttatagaaaaaagtgtggagaaccggtcagggttgtacaaaaaaaggctaggttcctacgttgttttatttacaccattgtgaggacgcccccacttcaggcgcagcagctgcacttgtccgaagcctctttgcagatgcagccctgggagcacttcgcacagcccacggggcagcaggaacagcagcttttcttgcaggaggtgcatttgcattgtttgcatttgcaggagccagcgcaggagcaggatccatctgtggcacaggagcagttggggtccatggcgaatggaggcggcagttggagatcaacgagagatcgctcctcgtgcc

SEQ ID NO: 762 - DNA, 489 bp, Rattus norvegicus
  Genbank Accession No. AI235991
acggcatgctttccaaggaaccaaaggagggtctcagagatgccccaaacatcccaaagtacacaaagctaagtaatcgattgcttacttattgcacagctagacacggattttaagtctatcttaaagctttgaagcaagcttagcttctcaaaggcctagcagagccttggcaccccaggatcctttctgtaggctaattcctcttatccagcggcatatggagtatccttattgctaaagaggattctggctcctttaaggaagtttgatttctgattcagagtccttgtttccctgacttgctctgccagccctgcaccagctttttcgaagtgcactatgcttgtgtttaacttctcccagttttatttgggcataaaagttgttgcctttatttgtaaagctgttataaatatatattatataaatatatgacaaaggaaaatgtttcagatgtctatttgtataattacttgatctacacag

SEQ ID NO: 763 - DNA, 408 bp, Rattus norvegicus
  Genbank Accession No. AI227596
cacaaacagaagaactcttacaatagtagactttctaaaataaatactattaaaatagagcttcaaaataaatattttttacaaaggaaacctttcgtggtaacttttgtggtggggggtgaacaggggggctacagtgacacaggaatgtggtggagtgggtgctggggcacagctctagtgctgctaacaggaaatcaaccacaggacacaagagaaaagcaagctaagaaacagcacagccacccacaatcaaaatggaaacacaggactgacatccaccattacagatcagggagggcacggagctactcaccaaatgcataactgggaggccagggaagccccggatgtcctagtaaatttatacagtgcaaatctgtgctgtccacacaccttagccatttc

SEQ ID NO: 764 - DNA, 505 bp, Rattus norvegicus
  Genbank Accession No. AI228299
cctttcaccaacctcacagagggcttctatttgtttatttaaaaacaaattttaaaaagtaaaatgaaaccaggtgagattaagatacattaaccaaactgcaacgtagaaaaagggacttgctggaaacatgacggagaccactggagatttcacagacacacagaagagctcacattgtcaacagaattaagctgctacgaattctccccagaacatcaaggtttcattttgctcagcctgagatctcgctcaatttcaaactgcctgtggtccacgcgctccagaaaagctttccgttcgatgtacccctctttccctcggttatggatggccagctcttcaccaatcccttcttcctccttgaagctctcccagtccaatttggatttctcaagggtgctcattttctgtttcttggctccaattttccctaaaaggctgctcatcccacttgttctttttatccctgacccagcagggggtggtcttgtcacttcagccg

SEQ ID NO: 765 - DNA, 475 bp, Rattus norvegicus
  Genbank Accession No. AI137579
  misc_feature (1)..(475): n = a or c or g or t
tttttttttttttttttggggaaattattctttattgaaaaataccaataatactgacagattccaaaagcagttactgtcccagagtacaaagcgcttagctcatttaccccaaacctgtttgcatctcaaggttagcatttctgtaaatcaagatacaaatccgataacttcaataaaacattttccagctttattctttaaggagctgtataccttcaaagtcagggtcacgaggtcagcaggagcacggggcagaatgcacccggcactccctgggcgtcagtttgcagcaacactggaaaccacattgttggtgctggaaacaaaaatcccgcacaagatagctgccctccaggatgagagggatgttggaaacagcatgtcganagatagcttgtttttcttataattaacacactattattttaagattgctctttggaggaaatcttaagaatgcactgtaatttcc

SEQ ID NO: 766 - DNA, 1020 bp, Rattus norvegicus
  Genbank Accession No. D10706
gcgcgggaagtgcagcggaggtttttgctggtttcggaccccagcggccggatggtgaaatcctccctgcagcggatcctcaacagccactgcttcgccagagagaaagaaggggacaaacgcagcgccacgcttcacgccagccgcaccatgccgcttcttagtcagcacagccgcggcggctgcagcagcgagagttctagggttgcccttcattgctgtagtaacctgggtccggggcctcggtggtgctcctgatgtccctcacccacccctgaagatcccaggtgggcgagggaacagtcagcgggatcacagtctttcagctagcatcctgtactccgacgagcggctgaatgtgacagaggagccgacgtctaacgacaagaccagggtcctgagcatccagtgcacgctcacggaggccaagcaggtcacctggagggcggtgtggaatggtggtggcctctacatcgagctcccagctgggcctctgccagaaggcagcaaggacagttttgcagctctactagagttcgcagaggagcagctccgggccgaccacgttttcatctgcttccccaagaaccgtgaggacagagccgccctactccgaaccttcagctttcttggctttgagattgtgagacccgggcatcccctcgtccccaagagacccgacgcttgcttcatggtctacacgctggagagagaggacccgggtgaggaggactaggtgccagccctgcccagtgtccctgcaccctctcccgggtttgtccacatgtcatgattgtgcagaataaacgctcactccattagcggggtgcttcttcgagctgaatgctgtgtttgtcacactcaagtggtggctttaattctaaataaaggtttctattttacttttttattgctgtttaagatggtcaggtgacctgttttagagcagcctcctttgaagtctggaaaaatggtgtcacctcccctggctcaaacctaataaataaagtgatctcgttc

SEQ ID NO: 767 - DNA, 512 bp, Rattus norvegicus
  Genbank Accession No. AI231093
ccttctcaatcagcctttattgcaggaacacctagttgatgatacggggaccccggggaacaaaggcacttgccttaagtacaaaacagacagcatggctaaggacttgtcctcgggggattggtggagtaaagacatcttattaacatgcttatcaactatgacctagtaaagatgtcagaagaaagctaaaggtggtagtaaatacaagcgaccactagatgtcagtgctatagataaatgctccaaacatctccctcttttttgttttattaaaagatgagtccattaggtggaggtagtggtctgagagagatcagacatgcctcacagagtgcccagcttggccatgacgagccactcctgcagttaggactgcaccccaatggctagagatgactgaaatgtacaacacaccgttctgggctattggtgtgctaataataggggagagacagagcataggggcatgggaccagcccgaatgtacaaacagggcagggcctagggcc

SEQ ID NO: 768 - DNA, 479 bp, Rattus norvegicus
  Genbank Accession No. AI230338
aagtcgctgaatgtggtattccacacctctttaatcctagcactggtgaagcagaagcaggcacagctcttgggtttaaggccagcctggtctatacagtgagttccaggatagctggggggagagaaaccaggtcagagctcaaatgctgtgggaaggcagccatcactccagtccccacagccacttattaaaggtatctcttgcattgtctaaccaaacactacaaagagagacaacaatacagaaatataaagtcccaggatgtttattacaaaggtaaaccctgatccttgagactggcttatcggtaggatttctggtaccggcccacgccgctcacatcgcgggttccaccgctcgcccgagctcaggcgctacgctcctccgtcgcccaggtgcggctccggcgggccggggtgtggcgcgggccgtggctgcggcccctccgtgccgctcaagctgaaaaccctcgtgcc

SEQ ID NO: 769 - DNA, 569 bp, Rattus norvegicus
  Genbank Accession No. AI104357
tttctctttacacaatgacgtgttgctggggcctaatgttctcactgaacagtagaaaaccaaaatttgtcatttcttaaagaattgagtacaaaaaccttacataaattaaaaggatgaatacatttacaggtgtcgatgcaaacgttcccaactcaaggcaagtaacaacccatggaggtcaggagggaaaaaaccagaacagaaactgggtcctaaggctcggactttcccaccctgttagactggcaagaaaagaagtggtaactagttcaggaacccttgccagcctcgggaaatcctggaagtctgctgttggttaataccctgcacagatcactacatggtgctcacagagatccactaggctggggactgactgacttttccacagatctccccagccaccaagtgaccgagccacatgaactaaggactaaatcaagatatgcacagggtattaaacatataccaagggaacagttaacttgaatacaaggtcaaaaatcagcaacaagttctacgatccagtgctgatatcagatacaagcttcaaggacaaatttctt

SEQ ID NO: 770 - DNA, 422 bp, Rattus norvegicus
  Genbank Accession No. AI059502
tttttttttttttttttaaagttggatttctgtttaatttaaaagcctcaaaaataacaagcaatatgttttttaaaacatgtcgtagacacaatcgtctattatacaatatacactgtacacaatggagcttgggcaggtagggtgatgaaggcgtggacggggtcaggatgggaggtgttttcatgtgagtccagatttgagttgaaatgtgtaatttagaaaagaattgttaaagtgagaaaaaaataccagagagagagagacagagagagagagagagagacctcctatgctcagcattgcccccatccctaagctgaacgcatgcggggaggcgactagcaaagagggaaggagcaatgaaataaaatgtctttaaagcacacgtacacagtgttcatcatctgaagttgagtata

SEQ ID NO: 771 - DNA, 651 bp, Rattus norvegicus
  Genbank Accession No. AA848804
actaggcaaagaattttattaaccttttccaaactttattcccaggcgtcttcagcttaatttgctgcaaagaatgaattaggcttaagcgaaactgaaaagagctgcagtgtccggggggcttgggcttaaaaatattagagatctagattttatcagatccataataaacaaaaaatttttaaaaagcagtcatgatataaaacagcagctcctattgtaacttctgccaagtgtcaccttcttcagaagttgcttcgattcagtttgcctcgttcatagcttcatcaaaattctccaccagatctggaacttcatcatcatcatcctctccagtagcaagtggtgcttttccatccacagattgtttgggcagagcttcagccagtctcctcaaactggtcagactgtctgcaccaagctggttgaggatgctgggaagcatttctgtcagctgctttgtctcggcgtggcctgtaatggtgaaggtgtttgctgccaaagacgcctgaactttagggttgttaaaatggatcactgttccttggtttgtaaacatgttcacctcttcaataccagagatattgtttacccctaacttctttaaggagaactgcagttttttatcgtctgctgtggctgttctgtgaa

SEQ ID NO: 772 - DNA, 429 bp, Rattus norvegicus
  Genbank Accession No. AA955536
tttttttttttttttttgtctattccatgtttattctctgggattctcaacaggacttgctttcccgggaagaactggtgtggttccccgtgggaagaggagccgaccaccatgtctaagacactcagaagtacacggagttctcactgttgctgtccctttggtcatcaaatttgcggatctgggccttgaggtgcctcagtttacccttcaggtagtcacagcgagcttgcttatccaggaaaccaggatccacccgcttcttctcaaactctcttctgacatgagctgccatgcgaacctccttctggcttcgcggcgggggcagtgacagcagcagagcctccagttgctggagcttagcctgcatggcccccacctgccgctggagctccaagaactcttcgtactggtcctgaaacactgcgg

SEQ ID NO: 773 - DNA, 4432 bp, Rattus norvegicus
  Genbank Accession No. D25233
ccggaggacgaccccgcgcaggacagtgaccccgaagagctgcccctgatcaggcttgagtttgaaaaaattgaagaacctgaatttattgcattatgtcagaagttaaaggtgcccgatcatgtcagagagagagcttggctaacgtgggagaaagtttcatctgtggatggaatcctggaaggatatattcagaagaagaaggaactctggggcatctgcatcttcattgcagcagttgacctggatgagatgccattcacttttactgagcttcagaaaagcatagaaaccagtgtctataaattctttgacttattaaaagaaattgataccagtaccaaagttgataatgctgtgtcaaggctattgaagaagtacaatgtgttatgtgcactctacagcaaattagaacggacatgtggacttatatatttgacacagcccagcagtgggttatctactgaaataaattctatgttggtgctaaaagtttcttggatcacctttttactagctaaaggagaagtagtacagatggaagatgatctggtgatctcatttcagttaatgttgtgtgtacttgactattttatcaagctctcgcctcctgcgctgctcagagagccgtacaaaacagctgcaacacccattaatggttcacctcggacacccagaagaggtcagaacaggagtgctcggatagcaaaacaactagaaagtgatacaagaactattgaagttctctgtaaggagcacgagtgtaatgtagatgaggtgaaaaatgtttatttcaaaaattttatcccttttataagttcacttggaattgtatcatctaatggacttccagagcttgaaagtctttctaaacgctacgaagaagtttatcttaaaagcaaagatttagatgcaagactatttttggatcatgacaaaacacttcagactgatactatagacagttttgaaacagagagaactccacgaaaaagcaaccctgatgaagaggcaaacatggttactccacacactccagttaggactgttatgaatactattcaacagttaatggtgattttaaattctgcaagtgatcagccatcagaaaatctgatttcctacttcagtaattgcacagtgaatccaaaagaaaatatcctaaaaagagtaaaggatgttggacacatctttaaagagaagtttgctagcgctgtggggcagggatgtattgacattggagcacagcgatataaacttggggttcgattgtattatcgtgtgatggaatcgatgcttaaatcagaagaagaacgtttgtccattcagaattttagcaaactcctaaatgacaacatctttcatatgtctttattggcctgtgctcttgaagttgtaatggctacatatagcaggagtatgttacagaatcttgattctggaacagatttgtccttcccgtggattctgaatgtacttaatttaaaagcctttgatttttacaaagtgattgaaagttttatcaaagtggaagccaacttgacaagagaaatgataaaacatttagaaagatgtgagcatcgaatcatggaatcccttgcatggctttctgattcacctttgtttgatctcataaagcagtccaaggatggggaaggacctgatcaccttgagtctgcttgttctctcagcctccctctccagagtaaccacactgcagcagatatgtatctttctcctataagatctccaaagaaaagaacttctactacacgtgtaaattctgcggcaaatacagagacgcaagcagcctcagccttccatactcagaagccattgaaatctacctccctttccctgttttacaaaaaagtgtaccgtctagcatatctccgactaaatacactgtgtgcgcgccttctgtctgaccacccagagccagaacacatcatctggactctgtttcagcatacattggaaaatgagtatgagctcatgaaagaccgacatttggaccagattatgatgtgttctatgtatggcatctgcaaggtgaaaaacattgaccttaaattcaaaatcatcgtaactgcgtataaggatcttcctcacgctgcccaggagacctttaaacgtgttttgatcagagaagaggagtttgattccattatagtgttctacaactcagttttcatgcagagactaaaaacaaatattttacagtatgcctccaccaggcctcctaccttgtcaccaatacctcacattcctcgaagcccttacaagttctcgagttcacccttgcggattcctggaggtaacatctatatgtcacccctaaagagtccttataaaatttcagaaggtctgccaacacccacaaaaatgactccaagatcaagaatcttggtctcaatcggtgaatcatttgggacatccgagaagttccagaaaataaaccagatggtgtgtaacagtgacagagtgctcaaaagaagtgctgaaggcggcaatccccccaaacccctgaagaagctgcgctttgacatcgaaggatccgatgaagcagacgggagtaaacatctcccagcggagtccaaattccaacagaaactggcagaaatgacttctactcgaacacgaatgcaaaagcagaaactgaatgatagcatggaaatctcaaacaaggaggaaaagtgatgatctcaggaccctaacactgtagaccctcgggacacctgactcgtgtctcatggatgtgactatagttcccaggttctgctcatgttatagatataaaatgtgcaggtacagctgaatatttatgtgggtgatttgtaagccacttcaatgttgtaatcaatggtatagaattgacagtacacaggattgagaatcttgtgcagatcatgccatttaaaatatgaaagcagattgttggcatttccaacaggagcctgctgccctcagaagtgaggctgcctctggagggagtcctagcaactcccttacatctggctgactactttgcctttccttgtggcacatgtgtgatgtttgctcttggttttattaatttatatgtattttttaatttaacgtgaatatccttagaaaatgtgtcttgtcttccaaatgcaagttgattgattgtccacattcaaccaaattatcttgaatcctctactgaaacagattgttacaaactggggaaaagtactaatttgtacacattggacttgttttaatactagaatctaatgtgccatatgtttgtttcacacattttacctttgaaatagaagtaaaaaaagtataaacatatgatactgtcttactactgacacagatttcatacctcagaccctctaagaaccaattcttttattcatccaactcatactttaaactgaagactattgataatactccaggtttgttttttcttttaatctttcagatcactgaatctttaagtacccatgtagtacttgaaaatcaagtctggccacaactgtacttcagaggaccctagtacagtacaacccaagtgcactttctaatgtctctgggtcctgaggaatcaagatacaaattaactatgttctgtaagcagaccgttaactataggagccttcggtttaactatgttctgtaagcagaccgttaactataggagccttcggttttccctcatacaagtgtctaaccacatctcaacagttcactctgctcttctgcatccagggctgatgtgttccctctggaatggtacatgtcttccagggtcttttgaactggcaggtatctatttttttaagccaatctggtctaataacactggcttcttcaaagccacagcatttctaatccagctgtgccgaagcttcagactaaaacagctgcattgaaagaagaggcactcccttcaccccccccccccacctaaaggtgtttacattatcttgtgggattaacttatttagagatgctataatttaaaataggcggtatttaaggtagcgtcagctagcatttaagaaaatcattttttctaaactccatactttttgaaaagaaatctggtcttgttagaaaacaaatttctactttgtcctcaatttagtttcagttttactaggttgatagttatctcgatgacaaaggccgtagacagctccccccatttcttcattgagttttgcatggccatcacacaggttagttgggtttaggtcaagggctgaccatacttctaggtcttttgctagtaagttcaagttagaattagtgacagaatcataggaattttcagagatcctctattaagatttcttaaaactgcagaccctgcttttgtttttgtactggttaaaactatacattcagattgctatgttcctattttctataatagtttgtctattttaca

SEQ ID NO: 774 - DNA, 441 bp, Rattus norvegicus
  Genbank Accession No. AI177813
tcacaccagtgtctttttattgggtctttcgtggccaacctggatgccttgagctgataatttagctccccagcctctcagacctcttggcctctgtggaaagagaaaaccagctcaggtactttcatgatcttaccacaacttggtccctgggctttgggcacaggctgcttcattcagacaagcccactgcctcctcctgtctgtgcgagggagtcagactcggggaggctagtctggcctgagatgcgcagcagcatctgcccatttgaggccccatctccgaggcatagcaggatagactcaggccctacagtttggtgttgaggtggaagaagtggggtgccgcataggttgtgacggggggcacgtgccaggcagacgaagctggacccagtctgttgctaaggacagtgtcatatggcgtgggagggaaatgca

SEQ ID NO: 775 - DNA, 515 bp, Rattus norvegicus
  Genbank Accession No. AI059449
tttttttttttttttttcggagctggggaccgaacccaggacctaccactgagctaaatccccaaccccgtttaatcagatttcttgtcactgaaaagtgacattacattttctaattctgtttctgctaatatcttaatattttgtgacagtaacaggtcacaaaaaggtccatgagtccagtcaatgaccaccttttacaaacagcgtttttttttttttttttttaagtagctatgtgactcatggaatggaatcaggtctctctcaaaagaaaaaaaaattctaatgctatttacatctgcaaaacaatttaaggaaatgttaattgtggaaaaagcaaacaatggtgttttgatcttcattttaattatcaagtagacaacacactttaatataaaaaattcacatactcatactcatttccctacaaatggaccatagtgttaggcaacaaatacttcaagttttgatttttaaaaatgtattccaatggtaacacccttaactctttt

SEQ ID NO: 776 - DNA, 496 bp, Rattus norvegicus
  Genbank Accession No. AA964957
tttttttttttttttttcacataggggatgtttatttctagttggagggtgccagctacttggggcagggctgagtggctgcacattccctaactggggaagaccgatgttcttgtctccgctaggacgctttcctaatgggcctagttgctatcctgggtggatgcagggatggagtgacaggccctcctggcactgctcttcacttcccccacgttttctcaatggggctcagtaacagtgcggatggcagttggatggggctgactgcctataggactgaggaggtagaggcacgtctgggggcatctggcactgtggtacagcttgtagctggacaggacggttcattcagggagtctgtaccatgcgcttctaggtgtcaaagacatagcgcttgaaagacaggctgagtgtcacaggctgtatgggttctggacgctcagtgctctcttcttgcttggtggtttccccacggccagctcggctccgcttc

SEQ ID NO: 777 - DNA, 588 bp, Rattus norvegicus
  Genbank Accession No. AI144797
  misc_feature (1)..(588): n = a or c or g or t
tttttttttttttttttangaccataaatatttttattaaatgtgaaaatacacgggcataaaaatactgcccatattcattgacatgtgtaagccccagttgaaataattttagttccttttgtattaaaacactaaattgagatggattaagtcaggtttgtaccatttaaaacaaatataaaggtaagagtaataatttatcaaacgtctctaatgtttacctcccctgtgcccacatctctttgcacaggtatctcaaccacagacagtgcaatgaaacctgtcgttactgtacacagagccacgcagtggctaattttactcttaaatcattcagcaaatgagatcatctattaaaaaaaaaaatacctcgcccccctttaacatcatttgaaattacagaataaatgctgccactactagaaaaggaatgatacgacctggaagaagatcagattagaggttaccatttcctctcctccctccatcactacggcaaggtcaagtacattcacgaaagccgtcctcactcccgttacccagacgcatctgtaagacagggcggcacacgagggcctgcacagc

SEQ ID NO: 778 - DNA, 649 bp, Rattus norvegicus
  Genbank Accession No. AA799442
  misc_feature (1)..(649): n = a or c or g or t
actgaggatctcataatgctaggtgaaagtagcagagttccttttcacttttacaccagtgccaaagaccttttataaagaggttcattctactgaactagcctccactgattcttgggttaatcatcaggcacaattcttgcatatgctttttcacatacagcatagtgatataagccattaaacactccaatattatctgaaacaacagaggaacggccattgctttcatcccagtttgacaaaggagtaaccaatggagcataactcttccctttggcggcactggaacagtgtgatacttaactgctaagcgtccatttttataaaaagccaaagcactgggataggagaccccacaggctacgccgatcagtgagcttctcagaacacagctttcctggcttatattacctgattgcagagcatcagtcacaaagagcttgtaagtaacggcggtagccacaaatggaagggtantcagggatgcataggtcctcaaagcttcatacntaaccttgaaactgtatctgaatactagtttgcccatacgcagacaactactactaatcaanngataagttcacgtanatttaaatctggtcgttnantagatcaaacttctctcaaagattcaacgatatgggct

SEQ ID NO: 779 - DNA, 284 bp, Rattus norvegicus
  Genbank Accession No. AI179971
gcttcctactcaggctttattcaaagacccaaaggtttaggtgcaagggagggaaaaagggcccggtcaaaaggcaagcccggcaggaggcggtttaacgggacttggagggcaacacagtgctcacagaggcaaggaatttgtccaaaaaggcgtgcctggcgggtgtgaaatctccagggggggggcaaacccagggcaccaacaggcattggctcaggaacttgaaatttaccggatccccaccccgcttgggggcatgcaagacgatcaaaagggaccgg

SEQ ID NO: 780 - DNA, 398 bp, Rattus norvegicus
  Genbank Accession No. AI031036
tttttttttttttttttcagtatttcaatcttttaataagtattttagtgaacaagatttgctatttcgaacatggagaggacactcaaaattctcttcagtaccacttcgtaaaaacatgaaggactcttttacaggtgcttctggttccaggggttctaggtactcatgacaaccacaacccattcattcatttctccaatagtccattgtcaaagacaattaagctaaaatctggaatcctactacccaccctacctctcattttgtattatgcttatgttctttgtcctttatttagttctgggttacctttgtggctcatcatttggcctcaattaaaagtgtacttgtttatctaggtcctggaattagaaacctaattagatagttttttc

SEQ ID NO: 781 - DNA, 461 bp, Rattus norvegicus
  Genbank Accession No. AI113008
tttttttttttttttctcatttcaacattctttattaataaaatgtatttcaatgtcaaaaggtatcactgttttcttcatttcatttcattcttctttgccagtcaggttaaggacagttgtaccagactctggagagggtctgccctgagcgcgtggtgattgctcttgctgttctagtaggcacatcgatgttatagtattgatctttggaaaaggcgtagtaatcatagccgtcaggttttctaatgttgggcagtgttatcgcggaagtaacgacatttgggaaccctctccacagtgtgctcaccttgtcttcattgtggaggaagcctttgtcttgataagaggctttgatgggcaccgagtaatggatcctgaaggtgtgtgtctggaaaggtccaacagcacgctcaaagcggcgcctcctgacctgtgctgcctgccccatacactgagta

SEQ ID NO: 782 - DNA, 457 bp, Rattus norvegicus
  Genbank Accession No. AI045340
ttttttttttttattttaaattgttttttattattattattataaacaaaagaactttcttgatttgtcagtaggactgttacatggtgagaatgcattgtactaagccatcaaactctcttccctcatcccccaggtaccaaacaatgcatggccaacactgaatgcagcagcgctacaaaaccagtagcattcatcacatgtaacagatacacattacattttcattacatgttcatgtaaggcccaaccctgcaactctggtctccttaacatccactaagctacaactgtctcaaatcatcttcagcttcacaaccattaagactactttcaacaacacaattcaaataagacttgaaagttaggatagaacaatctgacaaaggggaattgtacttaattcttatgagaactgtttatatatgttacagtttgagttattacaaaaatttag

SEQ ID NO: 783 - DNA, 592 bp, Rattus norvegicus
  Genbank Accession No. AA892042
caggcaagagcacaactttattttcacctctaaaagtaaaccacaattgataacaacaaaggagactgtgcagttcaactttttattttaataaaaccagaatatgcagagcacatgcggtgctagcatctaaactaatacaataagcaagtactaaagctacagtgacttgagggtcaatctttacgttcagcaagtttaaacccattcttaactttgaaacataactgaaaacattgcttgctgataagacttgctccaatgctatcgctgaatgtccaagtcactgaatatgccaatacaacaaagataaccacatgtttgaggattgcaatgtgccagacattcactgaaaaaaaatacaactaaacaaaactcacacaacaaacatctgagaatctggacactttgtatcagtgtttttgaagtgtttcattaatatcttaagacaagtgtatcaaaaccttggcatgatttagtttcaagtcgccaattttgtttttactaacatcagaaagttatggctacaccgccaatgccgggtctgcttaatttgacttaagagtttattatggcttaacattaaaagctc

SEQ ID NO: 784 - DNA, 487 bp, Rattus norvegicus
  Genbank Accession No. AA851733
cagtcaactggtaaagtttatttcgtcagtataaggaatttaaagccatttactaaactataaattccagtgcattagaaatgactgttggagcatttctgaggtgttgctgtcaatttaatgggaaatgttactgtctggatgttggtatgaaatgcagctgtcatgccttttattaaacagaactgtcatcagtggtgattatgatggtgggtttttatagctttcaggagttagactgtgcatgtgctttacatcattttccaaacattagtggtgatttggttgactggttatttctaactaagcttgtggaagtgaggggcagccatgatatgtgtcacaggagctgaggaatttcaggcacacaacactacctgtcagtcacccttcatcagaaactcagtgacatttacaagacaactagtgcaaaaagcatcaaaaaattatgcatggcagcagattaattttcttgaaattttaaaac

SEQ ID NO: 785 - DNA, 372 bp, Rattus norvegicus
  Genbank Accession No. AA944209
tttttttgaaagatggcgccttcgagcctggaagtccgatgttttaatgtatttatttatttatttatttggttaccttcctgttccaagcttccactgactgttgtccccccccccagggttttattatcatgttctgtctttttttttctcttccctcctcctgacttggggacctttttggggagggctgcaaggcttgcttggggtgttggggctccggtgggacagctgctatagctaccttctgtggggagccccttgcctacttgctggagtggctctaggctctgctgactgtgtacctaagacagaaaggcagttccggtgtggtgtgccttccggattctctctggggttgtgctttgagca

SEQ ID NO: 786 - DNA, 515 bp, Rattus norvegicus
  Genbank Accession No. AA894173
acatatcagagttcaaaattttacaatacaaaggagttaaccatcaaaagaaaaataaatgcaaatttcccccctaaaaaaaaaaaaaaagaacaccagttactagggtaaataacaactaggttgaggtttttttgccctggaaagagatgggaaaaagccagtttttcccaacgtgggtaaaatttgtaaagcaaaatgtggcgttttcaaggaagtgatcctggaagcttatttacactgtagttctgagctggaagcagacagtccccatcttcccaacagtctgtgggtgtggggtattccttgtcagccagagcagcaccagtgcaagggcaatgaagaggacccagctgaaaaactgcacgcaggattcttattttactggtttaaggcttgtgggcggctggctggggccagcaactccaaaggccctgctagtgtctccccaccagctattccatgcttggaaggtcccctacctgaaagcagtgtaaagcatactaggataggat

SEQ ID NO: 787 - DNA, 543 bp, Rattus norvegicus
  Genbank Accession No. AI172159
tctgctacccagactggctagcctctttggaggggcaggctactggtgcatcctcggaaggacgggaggaacaagtgtctcaagaggcagacacaagctgtgggacttggggacttggagtgagaagagagaaaggcccagtcagggatgatttccatatctcatcagaggacatcatgaggacagggagggctttagccttctcttcccttgcctctggtacctcctttccagatcctatactgactactccagacccccttctagcccagccccagtgcctacctacaaactccttatctctgtgatctagaactctcaaagcgggtcaggttagggcatccctgttgccctgctagcatgctgcccctgctaggaacacaggcagtgctgttagcagcaattagcactagagacaatgagtttggggatatagttctatcctagttgctaattccgagcagatctgcaagatggagtaatgaggggcctggaagagcttagaaaagcctcgtgccgaattcttggcctcgagggccaaat

SEQ ID NO: 788 - DNA, 583 bp, Rattus norvegicus
  Genbank Accession No. AA944584
  misc_feature (1)..(583): n = a or c or g or t
ctgcggacatcgcctggagtctggcggaccccactgaggccgcagtgcctgcggggcctcgcctcctgctgcccgccgtggggccaggccatgcgggcgcttacgcctgcatcgccgcgaacccccgcactggccaccgccggcgttcagtgttcaacctcactgtggcgggtaagagctgtagggcagtccagcagaaagaggggaagcacagggagccatgagggtcagcaaaggaaacagatagcaaaggggcgtggaggagccaacaaggccgagctggggcagctaccggtgggcgtggctgctggagaagccgagctagcagagtttagggaactagctgctggtggacatggcttctaggaaagggaggagctagcagtttctgagcaaacctcgtgtaagcaaggccaccagggaaagagtgaagctaagcatggaaggtacagggacattcataggtaaggtgggacactatcagggcggagcagaaacgtaattatggggcgggacaagagcgggtctagcctgtaagagggaggacaatttaggtggacgtgtgctgttngaggagggatat

SEQ ID NO: 789 - DNA, 520 bp, Rattus norvegicus
  Genbank Accession No. AA924794
tttttttttttttttttcgtgggagtgttgttttaatacagtctgtgccaagcaacatcataatctccaagtttctcctatctttaataggcaatattcagaatttaaaaaaaaaacaataacaacactgcagtcataaaacaggccagcgacacttttgaggagacttaaaaatgagaagccatgaattatcttctttgaaaagcagccatttcaaaaggttttctttaatatcataaaatattctcatggacaagtgagcgagcaaacacacatgcaccagtgtgcctctgacaagagtacccacctaccccacccccaagtggacatgaaattagagaaatgaacacagcagatggaacaggtagaaggaaaaaaattcagtaaaaagaatggaatataactttgtgcttggttattttcctatgtcacaacaaaaacatttcggtgcaaataattaatttttcctcttttccatttaagactggtggagaaaaaaatacttttctataataaaata

SEQ ID NO: 790 - DNA, 403 bp, Rattus norvegicus
  Genbank Accession No. AA999171
tttttttttttttttttagatgtgcaaagacaattttattcaaccaatgaccaaaaagacagcaaaaaccgtttagcttggtggagtacagactgaagagagtactcatgaaaatgttcctacttctactggtgtttagttttgttcagccatagccaccaacaaagctaatcctgaagagagcaaccaagccttaagattaacacggccaatgcagaagctgcattaaggaacacgactgtttccttcccactctgatgaaggatgcccactccagtctgatatatcattgtatctaaagttgactttgaaccatgccatacgtaagacagtggaagacttgcagccatagaggataggggacatgtatctccaggacagaagtatccccacatcatgaagg

SEQ ID NO: 791 - DNA, 465 bp, Rattus norvegicus
  Genbank Accession No. AI179147
cttggaaaggcacagttttattgtggcgtatcagggagggtctcagatcctccccacctccttcagcttggccaccaggtcttccgtggtctctacctttactcctgctaagcgctgagggggctcctccacactgatcacggagaccttggaggtcaggtccacacccaggtctccagccttgatcacttcaatcttcttcttcttggctttcatgatgttgggcagtgtggcatagcgaggctcattgagtcttaagtcagcagtcaccacagctggcagtttcaggcgaatcgtctccagacccccgtcaatttcccgttccacttttaccttgtccccctccagtgtcacctgagaggcgaatgtaccctgcggccagtccagaagtccggctgtcatctgacctgtctggttacagtcatcatcaatagcctgcttgcccaggaacaaaagcctcgtgcc

SEQ ID NO: 792 - DNA, 597 bp, Rattus norvegicus
  Genbank Accession No. AI639411
ttggaaacattcaaaaacctatttaatagaatgttttcatgatacctactgggctacagagcttggtgtaaagaagtccactctgctgattacagacttgtatgaccaagtagggcatttcttgatcccttcccacaccccaagagtcacagaaccccgtgggacaggctcacttgactgttcccaacagagatacatgtcttctggaaggctatcttccaacctgtgtgtgacagcagcctgtccaccagccattgtggtgtgcatagcgacagctctgccattcggatcttgtcaggcctcgagtgggtgtcttagggatctcagtccatgggcacctcagagatgctgacagtcttggatctatcctttaataacagcaattggtctcagtttaatggccttcttgctgatcccagcatcatggcaagtgttcacgacgtctgtcacattcttatatgattctggagcctcttccataaccagcttgggggacgcaacccggatggcgattcccatgtctgccagcttgtctaagacatcttggaaatctaaattacgacgtgattttgctctggacaaagcacggcccgctcc

SEQ ID NO: 793 - DNA, 857 bp, Rattus norvegicus
  Genbank Accession No. M83678
accatcggaattgatttcaagatccgaactgtggaaatagaggggaagagaatcaaactgcaagtctgggacacagctggccaagaacgattcaagacaataaccacctcctattaccgtggagccatgggcattatcctagtatatgacatcacagatgagaaatccttcgagaatattcagaactggatgaaaagcatcaaagagaacgcgtctgctgaagtggagcgccttctgctggggaacaaatgtgacatggaagccaagcggaaggtgcagagagagcaggctgagaggttggcccgagagcacagaatccgattttttgagacaagtgccaaatccagtgtgaatgtggatgaggctttcagttccctggcccgtgacatcttgctcaagacaggaggccggagatcgggaaacagcagcaagccctcaagcactgacctgaaagtatctgacaagaagaacagcaacaagtgctccttgggctgagggacatttcttgcctcctattcaccctgaacctggaggctagacctgagggaggtggactgaggtagactgatggaaaacagaggggaggagctgtggtggtgcctggaggggtggatgacaggggaggaaggaaagatgaaatgggcagggaaaggagggcgaggaaccaaggacgtgaaaagtgaagagaaggggtttgagaagagaaaaagaagaaggtctcaggtctcggaccgtccaacattaatgtcagtatgctgatctctccattcctggttcagggttcgggtcccgagaggctggctcggccctactctgagggtctctcactccacagatgtttgttagtattaaaggcc

SEQ ID NO: 794 - DNA, 503 bp, Rattus norvegicus
  Genbank Accession No. AI137597
  misc_feature (1)..(503): n = a or c or g or t
tttttttttttttttgtggattcatctgtttaatatagggaaataacattttgtcaatactaggcaccataaaatgtaaacacaattactgtcataaacctggatataccttcaaggattaaaagtggctttgttttagttaccctgtgtgcatatagtgcagaaaaaggtcttcatattagcactatgtacatgagaagaggtccacattacaagaggcaacgggagtttgaattctgaaaccttcattgagctttacagtgcatccaggtctatctccgtcactagccacgctccctgttacgcacatcatgacaacagcacagcagagtgagcgatgatgcgtaaaagaacttgatacactagaaaacagtgctcagtgatacatttacattctaccatatgattaaacatctgatcatacagtcncttcctacaggattactggctaatttgggggtggggcttatactgttagaggtattactaacatgataactact

SEQ ID NO: 795 - DNA, 283 bp, Rattus norvegicus
  Genbank Accession No. H33528
  misc_feature (1)..(283): n = a or c or g or t
cccaaatctaaaactacctttatttgtggctggctcagcataagtngccttcatcagtgagcagaattataaaactgtacaagaggtaaaaaaataggccgtttaacttagtgaccctcatatcatgagctttgaaaatacacataaaattgtacaatctggcagtttataaaatataaagctaaaaagaatattttagttcccacaaagaggagtgaatcacacaatcagcacatatccattaaacanttaactgtccacagagaagacacatggcacaaga

SEQ ID NO: 796 - DNA, 334 bp, Rattus norvegicus
  Genbank Accession No. AA923850
tttttttttttttttctcagagagaccctttattaagcagggaagaaaagttaagtggctgctttctgactcaggcagaaaaacagcatccgatgaccttgcaggtgtaatttttatgaagagaaaaaggcggtctggtaggctgggctatgttgtattttgattgggtatgttaattaggtgaaactgaagggggcttttgattgctggactttaatacttggatagctgggcctttgtaggcggcctcaggaggaggaagtggccaaataaggggatagaccttggggtctagcctcaggaatgtgatctaacacttttagccctcgtgccg

SEQ ID NO: 797 - DNA, 541 bp, Rattus norvegicus
  Genbank Accession No. AA866452
tttttttttttttttttaggttgcaagtcctggtctggtttatttataaagcaataaatatttgaagcacaaacaaactgcacgtgtgtaaacaaactgtacaatgactgatgggagatgggagagggcctcagaggattccaagcacaatactgtcgtcctgagtgtaaggtagccgcctcagaagcacttgcggtggacaatggagggcccggcctcatcgtactcttgcttgctgatccacatttgttggaaggtagacagagtatttacgctcagggggagcaataatcttaatcttcatggtgctgggagccagtgcagttatttccttttgcatacgatcagcaatcccagggtacatggtggtgcctccagacaggacattgttggcgtacaggtctttgcggatatcgatgtcacacttcatgatgctgttataagtagtttcgtgaatgccggcagactccataccaatgaaagagggctggaagagagtctcaggacagcggaaacgctcgttgccaatggtgatgacctg

SEQ ID NO: 798 - DNA, 633 bp, Rattus norvegicus
  Genbank Accession No. AA799992
  misc_feature (1)..(633): n = a or c or g or t
agagtgaaatgatggcagtgatgtcaacatcatacggggaacaccaagtccacactttgccccgagtcaactgcaaccacatgcgtcttcttgcttaaggcacctgagcccacagtgacagaataggtccctggatagacttctatgtagaggtccttagagatgttctcaataggccaagatgactcttgagaatgctctgatgtttgatagatgcttcctggaccaacagatgtctctcctctgcagtttctctgtgctcactcctgccatttttgttaagcccctccactccactaccttgagatgactcgagctcaggagagccacctgcctctgtctcccaggtgctangattaaaggcatgcactaccacgcctggctcagaaacagaacctctagaacaacccatttgtagtcccacatgtacaagattatgtggcttttaagcctgctaagacttcagagcacctcgtgccgattcttggctcagggcaaatccctatgtgagtgtataaatcgtaacattcatgctgttccgtgtgattgtaccgccaaattcaaaaaattcaccggacataatgtaagctgcgtgccaaggtggctaccacataatgttggccacgccgcttc

SEQ ID NO: 799 - DNA, 281 bp, Rattus norvegicus
  Genbank Accession No. AI233956
aaaacatacaaatatggtacaatacaatttattttaataaaatgccaaccggtatagtacaacaaaaaaaatgaatttaatacattaaagatgcaatacattataatattaaaataccacacaggaatggcagtacccccagggccccaatgagtacagtatttgtttaatgaagtagttattcagtcctgctgacgtggatacattctagtgagggcgtggggattggatcagggccttgagcccaagggaaaaggacagaaaggtcttctacggtctct

SEQ ID NO: 800 - DNA, 319 bp, Rattus norvegicus
  Genbank Accession No. AI029917
  misc_feature (1)..(319): n = a or c or g or t
tttttttttttttttttaagattagagagaatagaagggaaagtgggcagactggaatccccccaaaaatggggcccagagaggaggaagagtagagacagcaaggggttgtggaagccaagaacagccagagcaggtgagtcgaggtgttctgggtgacttggggctcaaggtatcaaggtaactatggcaggtcgggacagcaagaaagaggctccaggagaatgagatgatgttccggtgttcaggcaagcanggggtcacagcacactgggattccggaagttgtgtcncgcgaagcgcctcgtgccgaattctt

SEQ ID NO: 801 - DNA, 730 bp, Rattus norvegicus
  Genbank Accession No. AI172302
gggttttaattaaataaacttttattttagaatgactttagattcacagaaaagttgcagagaccaaagggttcccatatatcttcatccagcccaccccagagatatgattacaaactggaaggtaactaagacccagacagtatgagtcctggttgacctgctaaagtgctttctctccctggtctctgtttggtcctaagaatcaatccagcaccacaatacactttattcctttcaatctcattctctgggacactcagtgggtggggaagctggtgacctcactattgagctgggaagacagaggcttgaaaatgacaagcgtagcaagtgccacctcaccctgctgcttccgttgccttgtggactctgggtttgcggaagcccctctgaatgccccgttatccacctcattctgcttatgaatcatccttggagtggggtacccagctctagaaggcaccgtgccacgacttcttctaggttttaagaaccttacttaaaggctgacttggcccctctgtgtgcttatcaataaacttgtgaacgggagtgcttatgtgtgggagtgagaaattctgtctcttgtccaccaagattcatctgtgatgaaagatggccccacgttctttatagttcctcccattgagagctgggtccacttgcacccctggaatctaaggaatgaactgaccagtggagacacagtcctagcaccggggcttga

SEQ ID NO: 802 - DNA, 549 bp, Rattus norvegicus
  Genbank Accession No. AI010257
gcggccgcttttttttttttactcagaaaaaaaatcatctttattagaaaaatgttgaatatttattatagttaagaaaatttgcacatatatattcagctttttatgaattattttcttgtacatttgtttaagtaaacaacttcccaaatttcataaaaactatgaaataaaactttttcaaacatacaactttgaaccactggcagtctcacaggtacacagacttgttactgaaagcaagagaagcttttgaaatagatgtttgcttacaatcaaaggtcatagctatatggtcaaagtatcagaaggcagactctccgttatcagcccctgtaccagccccaattcagagctttagatataaagtccaattcttcgcaggaattcttggctagctagaccactgaagaactgtaaaacaattaccggaaaagaaatttgaaccaactagttttcctattatattctcaactgtttctgaagccattattttcctttcagcacgaggacactaaatgcaatggccaggcataaagcacacagtca

SEQ ID NO: 803 - DNA, 597 bp, Rattus norvegicus
  Genbank Accession No. AI009602
gacatacaaaaagacaatatttattttacttctgtataagtagttcaacagaaagcctcctagttgaagacattactgaaaacattaacattattgtatgccatcccttcagtgcccagattcagaaacatcatctgaatgaaaggaaaggaatgtaggaatgtccgctttatgttggatttacgtatgtaagtggggaaaaatctatataccttcgtcaatatatgaacttacaagttaccaataagcaatgtactgatatcatgaagagttcttaaggcctggagattacttttgtctgttaaaacaaaggtactcctatttgctgtctgtccccttcccccctgctactgtacttctgaatgagaatttgaagcaaaataggatgtctttgtttccatgctgtaagactgtcagcattgacggtttccagagcatttcaaaacatgctcttcagctccatcaacacaggccagtagtaaacaatggctctgtacaaggcatttacgatgctttccttctcagaactatgataccccggggaaggagtatttcacacttatgcaagaaagcgaagtcttgtttctactgactaat

SEQ ID NO: 804 - DNA, 558 bp, Rattus norvegicus
  Genbank Accession No. AI232326
cagtgtaaatatattggctttatttgtgtccattcggacgcctcacagacaacatccaggtaaaaagaccattaaataaaacgccttcagcgattgcaatgcaaaaataaatatcaatcctcggctgcagcggcagccgcgcagcgccccaagtcccctcggtcagctcaacaattataaaagtgttcagtgagagtgtcggcgtgagtgtgaaccggtatgcgctgggggtggggtatgcacagtggagcggtgtgcagaatcggagttgcgagccaaaggcctttgcagcggcgaccccgggcgagccgactcagcgcgggccgccttccgcgcacgctcaccgcagagttcgtactgggaaagagttaaaaaataaacatttacaagggcaaagaaagcggcttcccctccctggcgtccccggacgcgctccggggtcccggctgatccgcagccgggctacagtcccagagagtgaggggagctgatcccgggtagtcgtggccgcctggggcgcgggtcccctccggatgcttccgctgatgctcggcgctt

SEQ ID NO: 805 - DNA, 416 bp, Rattus norvegicus
  Genbank Accession No. AI138093
tttttttttttttttttaaatcacaaaaaatttctttagctaaaagtcagagaaaaacaagaattatgtggatgccagaactcgagaacgtaattaactttgtagacaaagatgaatgggggaataagcagtagcaaacaggtctccagagtctgtgctgcccagcacctgcccaacgtgagtaatagtgctagaatgattggcatcagaaacatagcttagttgcagacacagaaatacaaggacatccagtctaccagacttagggaccagaaaaaaacagaaaggtgaaggactatgacaggccactgctttgttcaagtctagcctgggctccagatgactctccatgagaagacttgaaaactggagtgagctaaagactcccatgacatcataaaccagatactaaacaa

SEQ ID NO: 806 - DNA, 479 bp, Rattus norvegicus
  Genbank Accession No. AI235348
gacaattttcatccttttactgaggaaaaatacttaatatttgtatgaggaacagtgcctaaggcaggtgcttacagtcctggcctcagccccacacactcctgttttgtaaagctatagggcagagcagagttggaatggaaaagacagggctggagatgagaacagtggggagcggggatgcagaatgacaacagccacacacgtgccagtcaaacactatgtccctgcagcaaatcagataccaacaagtgtctgcagtggctggtgaccctgccgtggatgcagaggaaatactcagtattaacagaaaactgagctgcagccactatgagactccaggagagcaccaggtttgctgttccttgtaagccaggaaagctggcctctcccagggggaagcagactgacactcacccatttccttgccttcccatacaagacgttcctctttggagaaatgagaccctggctagtca

SEQ ID NO: 807 - DNA, 1880 bp, Rattus norvegicus
  Genbank Accession No. X52815
gggggggggggctgccgatcgcaatggaagaagaaatcgccgccctcgtcattgacaatggctccggcatgtgcaaagctggctttgctggggacgacgcccccagggccgtgtttccttccatcgtcgggcgcccccgacaccagggtgtcatggtgggcatgggccagaaagactcgtacgtgggtgatgaggcccagagcaagaggggtattctgaccctgaagtaccctattgagcacggcattgtcaccaactgggacgacatggagaagatctggcaccacaccttctacaacgagctgcgtgtggcccctgaggagcacccggtgcttctgaccgaggcccccctgaaccccaaagctaacagagagaagatgacgcagataatgtttgaaaccttcaataccccagccatgtacgtggccattcaggcggtgctctccttgtatgcatctgggcgtaccactggcattgtcatggactctggtgacggggtcacacacacagtgcccatctatgagggctacgcccttccccacgccatcttgcgtctggacctggctggccgggacctgacagactacctcatgaagatcctgactgaaaggggctacagctttaccaccactgctgagagggaaattgttcgtgacataaaggagaagctgtgctatgttgccctggattttgagcaagaaatggctactgctgcatcatcttcctctttggagaagagttatgagctgcctgatgggcaggtgatcaccattggcaatgagcgcttccggtgtccagaggctctcttccagccttccttcctgggcatggagtcctgtggcatccacgagaccaccttcaactccatcatgaagtgtgatgtggacatccgcaaagacctgtatgccaacacagtgctgtctggtggtaccaccatgtatccaggcattgctgacaggatgcagaaggagatcacagccctggctcccagcacaatgaagattaagatcattgctcctcctgaacgcaagtactcagtctggattggcggctccatcctggcctcactgtccaccttccagcagatgtggatcagcaagcaggagtatgacgagtcaggcccctccattgtccaccgcaaatgcttctagatggactgagcaggtgccaggcatctgctgcatgagctgattctgaagtatcgatttgccctggcaaatgtacacacctcatgctagcctcatgaaactggaataagcctttgaaaagaaatttgtccttgaagcttgtatctgatatcagcactggatcgtagaacttgttgctgatttttgaccttgtattcaagttaactgttcccttggtatatgtttaataccctgtgcatatcttgatttagtccttagttcatgtggctcggtcacttggtggctggggagatctgtggaaaagtcagtcagtccccagcctagtggatctctgtgagcaccatgtagtgatctgtgcagggtattaaccaacagcagacttccaggatttcccgaggctggcaagggttcctgaactagttaccacttcttttcttgccagtctaacagggtgggaaagtccgagccttaggacccagtttctgttctggttttttccctcctgacctccatgggttgttacttgccttgagttgggaacgtttgcatcgacacctgtaaatgtattcatccttttaatttatgtaaggtttttgtactcaattctttaagaaatgacaaattttggttttctactgttcagtgagaacattaggccccagcaacacgtcattgtgtaaagagaaataaaagtgctgcagtaaaaaaaaaaaaaaaccccccccccccccc

SEQ ID NO: 808 - DNA, 375 bp, Rattus norvegicus
  Genbank Accession No. AI071137
  misc_feature (1)..(375): n = a or c or g or t
tttttttttttttttttcaacttgctcagtgctttattgaaccaaggccccaacagaggatgcattgggggccttccagcatgaccttttcatatgtagattctgaacccaaaagttgcttaccaaaatacttcactcgatttgtgtgcatacatgtgtacaaggcactgtgcatccatgaccatccaacaaagggcctagactctgtcactagtacagcaacacggaaaaaccatgcatactctggaccagatatggaaagaaggacagagagggacagggagggacagagaaggaccaaaaagtgaagctcagtgactggttcattgcccagcaacaagtgctgaccagcgaggctctanggttcacagcagt

SEQ ID NO: 809 - DNA, 415 bp, Rattus norvegicus
  Genbank Accession No. AI638988
ttccgtccccctcccagctcagctaatccgacttccccgtccctgcagctcctggagtccggaaggttgacctaaaggacagacacagtcccacaggttttccggagggttagtgagtccatcaaaagagccagaagagcagtttccgggctccctcccgcggattctggttaccagttctgccgccccctggtctgttgccatggaaaccaaaccttccaggcgactttgactttgcgtaagaagggtggtggtgtgtgaggttgctgaagggagagctgggttttctcggagcctggtgttgaaagggcggggtaccgagtgcctgggttctattctgggcatggaagcagacagtagggcaaagagcagctgtggctggtccccagattggtatgtgggcatcagaagatga

SEQ ID NO: 810 - DNA, 368 bp, Rattus norvegicus
  Genbank Accession No. AI013260
ggcattccaatacactttaatcgaaaagactttggcatggcggcgggagagctgccctaggctgccagggctacccttgtgggctgggcctcagcggcggctgccactcacacggtggtgatggcgcagctcatctccatcctcttcctcatcgtcattgtcctcaaccatggtcagtgagcgcaccagcttgcacatggccacttcttctccagtggcgttgctgagagccgtgcgaaggctgcgcccacagccccaagtgttctgtgccttccacaccaagtcagtaagggggctatgggtgaccccatctcctgaatcccagatcgtcaccacctgcccggcctttagggtgaacttcggtggga

SEQ ID NO: 811 - DNA, 348 bp, Rattus norvegicus
  Genbank Accession No. AI112161
tttttttttttttttgtagagaaacatctttatttgggtaatatgtcccaaaacaggtcagttagtaaaatagattctacagagtacagccctatgcacagccctccctccccaaaaataatcctgggggtggggggaatctgtctccccaccccgggctcctcagatataaagttttggcaggttattgttattatctaggtttggcccaccatgtccactttctgtagtggctggtatcagtacctacttttctcattccagaccagttcagcaaacatttctgccccaccccaaattgtggggcctaaataaagagcaaataggtctcctccactcctcgtgccg

SEQ ID NO: 812 - DNA, 2908 bp, Rattus norvegicus
  Genbank Accession No. D88250
ggaggtatcgaggaagagagaacagggaggtggggcggaggttcctcgcagagcctctggagccgcaggggcttcacggcatgaccagaagcaggagaggaggctgacccacttgttcccatcagctcctgaaggtgacactgagccctgggtggcccctcactgccaaagcagtcacctgtatttgtcagataaagacggccagcccggctgccctttacctccaagtcagagatccagagagccatgggcaaatcgccagagatgtggtgctttgtcttcttttctcttttggcatcgttttctgctgagcctaccatgtatggggagatcctgtcccctaattatccccaggcgtaccccaatgaggtcgtgaaaacttgggacatagaagtcccagaggggtttgggattcacctttacttcacccatctggacatggagctgtcagagaactgtgcatacgactcagtgcagataatctcaggaggtatcgaggaagagagactctgtggccagaggtccagcaagagtcccaactcccccactgtagaagagtttcaattcccatacaataggctccaggtggtctttacgtcagacttctccaacgaggaacggtttactggctttgcagcgtattactcagccgtagatgtaaatgaatgcacagactttacagatgtcccttgcagccacttctgcaataacttcattggtggatacttctgctcctgccccccagaatacttcctccacgatgacatgaggacttgtggggtcaactgtagtggggatgtattcactgccttgattggggagatcgcaagtcccaattatcccaacccatacccggagaactcaaggtgtgaataccagattcggctgcaggagggcttccgactggtgttgactatccggagagaagattttgatgtggaaccagcggactcagaggggaactgccacgacagtttgacttttgctgcaaaaaaccaacagtttggtccttactgtggcaatggattccctggacctctaactattaaaacccagagcaatactcttgatattgtctttcaaactgacctaacggggcaaaataaaggctggaagcttcgttaccatggagatcccatcccctgtcccaaagaaatcagtgctaattctatctgggagcccgaaaaggcaaaatacgtgttcaaagatgtcgtgaagataacctgtgtggatggattcgaagttgtggagggaaatgttggctcaacatcattctattccacttgtcaaagcaacggacagtggagcaattccaggctagagtgtcaacctgtggactgtggtgttccagaacccattgagaatggtaaagttgaagacccagaagacactgtattcggctccgtcatccactacacgtgcgaagagccatattactacatggaacaggaagaaggcggagagtatcactgtgctgctaatgggagctgggtgaatgaccagctgggtgtcgagcttccaaaatgtattccagtctgtggagtacccaccgagccctttaaagtacagcagaggatatttggaggatactctacaaagattcaaagttttccttggcaggtctactttgagtccccccgaggtggcggggctcttatcgatgagtactgggtgctgacggccgctcacgttgtggagggaaactctgacccagtgatgtatgtcgggtccacacttctgaaaatagagcggttgagaaatgcccagaggctcatcactgaacgtgtgattattcatcccagctggaaacaagaggacgacctgaatacacggacaaattttgacaatgacattgccctggtgcagctcaaagaccctgtgaaaatgggacccactgttgcccccatctgcctgccagaaaccttctcagactacaacccctcagaggttgacctggggctgatctctgggtggggccgaacagagattagaaccaatgttattcaactcagaggggcgaagttacccataacatctttagaaaagtgccagcaggtgaaagtggaaaacccgaaagcgaggtcaaacgactatgttttcactgacaacatgatctgtgctggggaaaagggtgtggacagctgtgaaggtgacagcggaggggcttttgctctgccggtccccaatgtcaaggaccccaaattctatgtggctggcctggtgtcctgggggaaaaagtgtgggacctatgggatctacacaaaggtaaagaactacgtggactggatcctgaaaactatgcaggagaatagtgggcccaagaaggactgatccgtagtaacaacacccctccaggactagcaaggtcatttttctcagatcctgggacggtcccattatttcaaaatgatggagagagggtgtgggagcatggttaacgttgaacatgattgtcaagaagcctgcttggaggcagagttgatcactgagccgtgttggttattcagttgctattgctaacaacatgcggaagcctttctgtcttgcttcatcccacagggatatcttaaacgatttccccctcatttaacccgcttgaaatccttattgcttacagtaaagcatgtttccaatctggttctggctgctcgagagcccagaaggagagggaaatttgagggtattttgtcatggaattcaggcatcgacaggttgtctgaaacactatgcagtcagggaacacagccttttttctaagtgagatttacccaatagctggaagtcagaattgactaccttagctttcctttgtgagttgtttcaatatgttccctagaaattagttttcttataatcctcctttgtatcatacaatgtaatgacttaataaaagagaaattgaacattg

SEQ ID NO: 813 - DNA, 420 bp, Rattus norvegicus
  Genbank Accession No. AI030163
tttttttttttttttttagagaaactctggagatttattgaacaatcacagtcacaactgaacatggtaagtcatcttttacagagctcactcttccaggagaggtgggtggtcttgggcttcccccacagaaccctgtctcagtgcccagcttccctgcctgcagccccccccaccccaggggaccccagccttcccgtcagagcagagtggaacctgttaagatctcgaaacagctattactctcacccagcagggccctgattcagcatcaaaaccttaaaccaaaatatgactaggatttgtcgtagaaagcaccagcagcaagtgttgaccggatgcagggtggaactgcactccttgtccctttcccactgcctgtcttcagttaaacacgccaccacttcttggctacacgca

SEQ ID NO: 814 - DNA, 555 bp, Rattus norvegicus
  Genbank Accession No. AI113026
  misc_feature (1)..(555): n = a or c or g or t
tttttttttttttttttcagctaataacttatatttaattactaaaaataccttcatatttaacagccagaaagaaaacaaaaacagtacagtctccacatgcactgacatggcgcccgcttggtggctactccagagatgtaggcatttttgccgtatagtaatagtgtccagccattaaaaactaagccgtcagataggtaaatgtgttgtttccaaatgaacatgtcaagcacaagacggaacaacgaactgtgcttatccagatgataacctgtaaccactacttagaagtccctggagactgactgctgtggttccaggacagctgagctgtgtctgtgtacactgtagaaacgtgctccgagtaatgtggtcccgggatttatctgcaccatctgagggttctgttttccagttatttactgatgaactcccacgtaacattcttgcttgtgacagagtccgaatgcatgctgtccctgtgattctaaccatggccttctcataggtatttctccagacccgcaatgcctttgggtctnctttggttgg

SEQ ID NO: 815 - DNA, 430 bp, Rattus norvegicus
  Genbank Accession No. AA894004
gggaacagaacgtgtcctttattgagcatccagagggcccctcagttctgactcagcagccagaggggaaacaagcaggcaggtggtgggggcaggagagcagggatggggacacccaccctcacttccagtccttgaagaactgcttgaagatgggactctctcggccctggggcagaatctccacctgagtgtttggggaatatctcattcgagagatgaagccatcagccacttggagggccgcctgccgctccttctcattggcttttctccccttccagatgtagattttgccacatagcccgttgtccagaacaaagcagtcatctggaattagcagttcagaggcaaacgggctggagtcagccaccttggtcagattcatctgtccagtggcatcagagaccttatacagggctgcagcctg

SEQ ID NO: 816 - DNA, 1157 bp, Rattus norvegicus
  Genbank Accession No. M36410
ggcaggctaggttgcgctgtctgcgtgctgaccggggcttcccggggcttcggccgcgccctggccccgcagctggccgggttgctgtcgcccggttcggtgttgcttctaagcgcacgcagtgactcgatgctgcggcaactgaaggaggagctctgtacgcagcagccgggcctgcaagtggtgctggcagccgccgatttgggcaccgagtccggcgtgcaacagttgctgagcgcggtgcgcgagctccctaggcccgagaggctgcagcgcctcctgctcatcaacaatgcaggcactcttggggatgtttccaaaggcttcctgaacatcaatgacctagctgaggtgaacaactactgggccctgaacctaacctccatgctctgcttgaccaccggcaccttgaatgccttctccaatagccctggcctgagcaagactgtagttaacatctcatctctgtgtgccctgcagcctttcaagggctggggactctactgtgcagggaaggctgcccgagacatgttataccaggtcctggctgttgaggaacccagtgtgagggtgctgagctatgccccaggtcccctggacaccaacatgcagcagttggcccgggaaacctccatggacccagagttgaggagcagactgcagaagttgaattctgagggggagctggtggactgtgggacttcagcccagaaactgctgagcttgctgcaaagggacaccttccaatctggagcccacgtggacttctatgacatttaagcccatgtcctgtcacagcgccccccccccccagccctgcctaacacacatacaagccctccaacccagccagcgggagccacgggcactgccagtcctgagaaggcttctgcagaggctcgggagagagctgatgtgtactggagtcctctgtccccaggaagagaacttagggctgggagagcaggagaagcagaaacactgagcagatgaggcagagtctctcgtctgtggtcgttctcaggtgaagagggcggggtctgattcacagagaggaccgagggtattgaatctttgttgtactgccttcatcctggggtattcactggtcctccctcgactctggtcaaatacatggttatggcagatgccctaga

SEQ ID NO: 817 - DNA, 466 bp, Rattus norvegicus
  Genbank Accession No. AA925516
  misc_feature (1)..(466): n = a or c or g or t
cggccgcacaactttttttttgatctgtcactgtttattatttcagcactgtaactgaggaggagcctgaactgctggctcatcttccctttgtatttgtataaggagcactgcactcctataaacgattttaaaatacaaaatgtacaagaaaacacaatcccaagtgctgtaaacataaccaaaatccaatttcttcacctacacatccgttctataaaacacaaggtttcaacttgagcccatgtgttctacatattaaaaactgggcttggtggctgggcccagcagaggtctggtgatactggctggccctgggtatangtgggttgtacccagggcagcagcaccacatgtgaacccaaacatttttctagtaaacagaaggctgctccttcattcctcaacccaagttctagtacaggtgagaggaaagggtgtgtgctagcaaatgcccagttgctca

SEQ ID NO: 818 - DNA, 643 bp, Rattus norvegicus
  Genbank Accession No. AI102495
aaaagtatccgatctctttattctcaaaacattataatactacataaaatccaagaggtatggggttggtctttggtctttgtggctttagggaaagcagaggagcccagaacgtgtctgtcatcctcgggatgtagaaagatactgattgaaggcatacatagatcccaagtgtgctgggaaatgggctccagctcttccagaggaatgaaagttaatttgagaaggcaactaagtaagaggaccaggcatcggagcagtagaaggatatctatcgggaaggtgaagggtaggcacctcctctttcctttctgctagactctaagaacagggactagcgacccagcaagtgaccaaagtagacagctacttggacccccctgggggagcaccagatcactccgcggccagtcagttggcacgctcacggggtggaatgctctccataagaatggagacaaactgctccaatttctgtgcagctgctttcccggcctccagaacttcctggtgactggccttctccaagttgttgtaatccatgacaaccttgttagtaatgagtgagaaaccaaagacacggagcccacagtgtctcgcaacgataacttctgggactgtgctcatgccaacagcatctgct

SEQ ID NO: 819 - DNA, 311 bp, Rattus norvegicus
  Genbank Accession No. AI013369
acacaaactgacctttatttgttgtactgaagtctgttttggttttgatacaaagtaacattttagtacatcatgtcccacctgtcagatccgtacctgcccacttgctgaacactgaacagggcctatgaccagggaaataacccctgacctgaaactgtgcagagtaagaacttgagagtggtctgtggcttttcttagttgtctgagctagaaaatgtgtgcctgtaaggcacagaacagccttgagggctgcaactgtgtctctctctctctctttaaacagctgtgcaagaaaatatatccctttt

SEQ ID NO: 820 - DNA, 388 bp, Rattus norvegicus
  Genbank Accession No. AI172339
ataaaatcatttaatattgataacattccagagcagtttgcctttgaacttataatacattatcatttaatagtaaaacaatggcaggttgatttattgagggcttactcaaggagagtaatcacaacatggtcatctttgccttgccatagcatctccccttcaaagtgcaccagtccgtgtttcctggcacgcatgaggatgcccaccactttatctgaaattcgaacatatctatcaaagagttctccgaaagtaacctggatcttgccatctcgtctatggcgagccattgtgcggataacaaagcacaattccataatttcccgatagatgtgctcctcggctaaatacgtgtttgctgatcctgcgggtgtgttcctcagca

SEQ ID NO: 821 - DNA, 605 bp, Rattus norvegicus
  Genbank Accession No. AA892545
aagaagaagaggttcttaagtttattgcttgactgggccaggtcgttgggttttgtggtcaccgggctttgtctcccttctgggacaatggtttcttccagaggaccaataggacaagcaagttcaccatgagttgcacatggcccaagatggagacaccatagctccggtacagcaggccacccagggtgggtcctacagtacgggtcaatggatgcacagatgcacagaggcccaacatggtccctgtgtctgaagcagatacagccttggtcagcatgctgtctgtgactatgttgagagcacagagactgaatacgagtccaggcaacaaaaggcagaagtggaacacattggacatcagtgccatgcccaggcccacaacagcaaagactagtacactggatctcagcagggcttcctctggaaaacgggtgcttagtctcccaataaccaggccttggatcatcatctggaggatcccaaagaaggacatgaggtagccagcctgtgcagcctccagctggaagaagtccatggagatgatggagaacatcaccatgaagagtcctgaagggaagccagagattaccttgaccaggaat

SEQ ID NO: 822 - DNA, 422 bp, Rattus norvegicus
  Genbank Accession No. AA955482
tttttttttttttatttctcagcatgcctttattaggcactatgtcactgtgcctgaagtgctgatttgcaacaagtgagatttttcctagggctccacagtgtaattctttttcaagatcactggggtactcatggacttgaaatgccgctgtccatctaaatacaacatggactctccatatgttttggggaaaatcaacggtacttctttttctgacatgaatgtaaaatgaaagacattggtggtcatatgctcacgactgtcaagagaggccacttcactatggactctgacttgaatgtaagtgtcctgggtgaatcatacctgtgaagcaagaaagagcaatgagccaacttcaacaggtttctgaaacatgatatcatctactgttaccacatatggccgggaaccaccaaaac

SEQ ID NO: 823 - DNA, 494 bp, Rattus norvegicus
  Genbank Accession No. AA875428
attttttttttttttttgcacttctgtgtttaataagtcacatcttcagttgctcctggggtggaatgtgagaccttgactcttgtagtgatgtcagtgggtgggcatgaggctgtgaagaacatctttctgccacacagatgacatctctggagtaggtacatgtgcacgaggagctccatagtttcacccacagtacacctgctacaaagtccctgtaggcaatggctgccaagtggctatgtgacatctaacaaagacagtggacacctgaggtagctagtagcccagcagagacaggagtacaaccattagaggaggcagatccaagaccacaatgctcttaggaaccatagtgctctcaggatgtggtgttttcatggggacattggccacccacccccttgggggagggtccacaactatctggcttgcagctcactcttactgatagtcctaagggctaaaatgatgctggtggactctcagggcga

SEQ ID NO: 824 - DNA, 428 bp, Rattus norvegicus
  Genbank Accession No. AA818971
taagcttgcggccgcggtacccatgtagacacagccaatggcggcggtcccgtagctgtgagttcgtgctcccagtgtcaggcctcccgcacaacctccaatgaagtagttcagggggtcatctggcttctctcggacctgggcactgacacaggtggtaaggccaaacatagctccaatagcagctgcagtgaatgtgaaccggccgaccctggccacggcttccaggggagaatctgcagggttgtgtgtgatgctgtaagcagagcttattaggccacaaaggccgcctaaggcagtagtgatgtaggccttgcgatgacactgggtgccgtcgggggtctcattgtaggcttcgaaaaaccgcttggccatggccgtacctagccagcctagcagactttacggcgtttgggcgcctcgtgccg

SEQ ID NO: 825 - DNA, 296 bp, Rattus norvegicus
  Genbank Accession No. AA996840
tttttttttttttttttggctgttaaaacattcactcccacaaaaggggagtggacagatttattgaattcaaactgggaaaggagcacctggatggctggactctgggcccaaccccaggcccctctgcccaagatgggggcctgcagaggatgaggcacaaaggcctgcagctacccagattggaggtgcctgctgtcactcactcccctggagggcctcttggaaacctccaatctggaaagaaaaccaagggccaaagactgggccagagaaagggatctggggaagtggaa

SEQ ID NO: 826 - DNA, 333 bp, Rattus norvegicus
  Genbank Accession No. AI072896
tttttttttttttttttggtttaatttttcagtggagaattgtgaagctggagttcctgagtcgtcttctccttattagtctttaagggagtgggaggccttggcagtccggctgttgacgaagtccgtcttcttaaactgagccttcttgtaggcattatggagctcggtgtgtgcccacagagagtacaggaggacagaggcagctttgctggccttgttgggggcatagccttctcctatgctgatggtcataattttctgcagccctccagtgttcagaaggtctcgtgcattctggtaactattttgcattaaattgttcaacgtata

SEQ ID NO: 827 - DNA, 574 bp, Rattus norvegicus
  Genbank Accession No. AI104244
ctgttcaggaagcattttattgtgctccaaagacaagcgctcacacaggtgacagtctctcagagcagatcccgcatggccttgctgagcttctgaatcttgctctttgcagacatatcaacgtatttctctccaattcggacaatcatcccacccatgattgatgggtcagtcttgacctccaggttcagtatctggcctttactcaggaagctattcagcactgtctttaactcagagagaacagcttcatctaaaggaaacgctgtggtcactgtgcacggcacttctccacggtggacactcatgatggtggagaaggcagagatgacgccctgggtgttgcctaggcgaccattttcagcaagtaaattcatgaggttggccgtcagcggagagaatttttcctttgtagtgatgtccttcaggcttttcactttgatggagcgcttaatgtaggggttcagaacagcaagggacaccttggggtccttcaagagttgccccactcgcagcaactccttttccacctggtccagccttttctgcttagacgcagcagagtacagggcgg

SEQ ID NO: 828 - DNA, 476 bp, Rattus norvegicus
  Genbank Accession No. AA893493
ctgggcatgacatttctactcctgcatcttctcgatagtttcttccttgtatttgcccttctcctttcctacttgccgggacttggctttcctctccaggatcttcttgcggtccttgtccagctttagcctggtgataaccaccttgctggggtggatgcccacatggacagttgtgccgttagccttctctcgctggactcgctcaatgtagatgacgtatttcttcctgtacacttggaccactttgccaatctgctggcctttgtagtgtcctcgaacaacctgaacttcgtcgtcctttcgaatgggcatagaccgaacattatacttctgtctcaattctttggaaagcggctaagacatgatcttcctccgaatgtgagatggtgcattgaaatgccgtttgcggttcttgcttcggtcagaagtcacgaagggattgaacttcattttggcggctgcaatccagcgat

SEQ ID NO: 829 - DNA, 650 bp, Rattus norvegicus
  Genbank Accession No. AI232021
gaaaacaagctttatttaaataaggatttaaatacattacataacattaaaactggaagggaaaagaaaaccaaaagaccagtttgttccttcacatggcactgggcagtggcttgtattgtgttgaagcctttatagctagccataagaccaacagcaccagcttggtatttgttcccttgtcgtaagtttaactgataccaggctggccttacccttcatgtttcaacatcccttggctaggagagatctgcctaaaaaagactactgccctggtggtgagctaatgtccatgacttctctggaaaggtagccctttctggattctgcctacctggtcagacaccaggggttctttttacagccagagagactcaactctaatgatatagctggggcagttacccatactctcagtcacctgggctgttcaaatggtgacactcttctagggctggggactgtgtcaagggagtcccaaggaacttctggtcagacatagcctccagtgatttgggggttcttggcttggctgaaatcctgttatttattgctttgttccagggtggactgtcagggcttactgcttaacctgtttaaaatgagggactttaagactacacagcatggctcttttcagtttattgcat

SEQ ID NO: 830 - DNA, 507 bp, Rattus norvegicus
  Genbank Accession No. AI234152
tgaagacttctgcatggtacacttggccttacaaatgttaatggctagttaatgtttgtgccacacctagcgcatcatagattctgctgaccagtaacagcttctctgacatggttaacacccaaattgtgaatcatggaacttttacttagtgcacacacaatctactgcaaactgaaatactaatctataacatctagctgaattattggatccatttcaggattgtgcttattatctcagaagataggaactagcaaaaatacacattccttttgcatattcccacccctgtattacgctgtaaaagaaatattgttcagtgcaccccctaagaaataaacttccttataggatttctctctttctctctctatatatatctatctccaaacagaggaagagcacaatgcaacttttaagattaccacttaaagcaagagaggtaagaacactcaggtactgcagtcgctcctgactggaaggttcggtttttgatcatcactg

SEQ ID NO: 831 - DNA, 403 bp, Rattus norvegicus
  Genbank Accession No. AA819415
tttttttttttttttttcactttctatgtagtattggatgttacaatttatacaaatgacacattttaggcaaaattaagtgtctactaagaaaccagcgtctctgcagaagcagtcttagataccccagggcaaactaggctgaaacagcatattaacccggtagcaagctttccagattccttattcaatattacaactcccactacataaacattcctgtgccatgcatggacagcagcgtggggtccactgatgtcgcagctactattctaatggccgaacgctgcacctccagttctgccctctacagagtgaatggacgtgatggctggggctccagagtgacagcaaactgcttcttaggtgacaggcttgtggcaaagtgtctccaaagtggagg

SEQ ID NO: 832 - DNA, 414 bp, Rattus norvegicus
  Genbank Accession No. AA819065
tttttttttttttttttcccaagagttagtatttcaaaactttattttctcaaatgagcaccaacacagatcagcaataacagaaataacgcacttcttactaatactgaatcattattatgtacaaataccggaaggaggtgaagacaaattattcaaaaacaatcgccttcgttattgaagcaaagtgacctgggaaaagaattcccacccaagaaaggaaaaaaaagaaaagaaaaacaaaagcaatcccaaacccaacaaatacagtttgtaaacagacagacagacagacagacagacatatccatggtgcacagtctctgcaggctgggaaagggaaactgactcctgttctcaccaaaccaccgtaagatgctgggcagctctaacccaggaggacaatgcctttct

SEQ ID NO: 833 - DNA, 476 bp, Rattus norvegicus
  Genbank Accession No. AI177312
accaaaacagtaactttattacgtcttcattacagcacacacagtcactgcattctcgtttcccacagcattcatgggccttttctcactgcagtcgaaacgattggaagtgggtagccagggcatgcaaacctgtgcgttctccaaaacctgtgctgcaaggctgctgtctgctccaagagggcgcccaggagctaccttaaagcggcttctcatacggagctacacagcgatgcttccctctgaccttggagagcctgccatgttctccacctttctttactccatcactgtacctgaggtagagccgagggatcttagactcccaagctgctgggatctggtggctgcagcccacgaagaatcacatgcctcagctctcccacggactggcagccagcacttgagcacaggatttcacacgcctcttcctgcttcttaagtttgcatcacccgtttctatactgactctttct

SEQ ID NO: 834 - DNA, 659 bp, Rattus norvegicus
  Genbank Accession No. AI231776
aagacttttcagagtttaatgagaaacttaaaaaaaaaataatacaaataagaaattcactttttttaatgtacaaaaaaaaaatgtatgagaaccaaaagttaatgaacactgtcacatgtttataccactatctagttcatattaattttactcttcaaacaggaaggtggtggcaatttagggaacaagagaaaaccaaaacttgttctacagttattcttctacatgtgtaagctgtgctcacagagacggcttcttttacttctgtgtacaggagaagttcagttgtatataaaattaaacctgctcagcagctgaggaagactagaaatgatgggtccgtatcccggagcattgtcgtacagttcaaacaacggtgcagctaccagcttgtaattcttagggaccgcaaacaaggctttctcttgaagctgaaccagaaacaacttcttatgttccttgggctttgttatatgtgcaggaatatacgggtactgaggaggttcaaaatttggtctccaccagttcccaatgcagtcatcgatgacccagtcttgcaggactccatcttgacgacccagtatctctgtcattaagcgttttagtccttcaacttcatcttctcctgggttaagttcaccgccaggtaatttgaa

SEQ ID NO: 835 - DNA, 300 bp, Rattus norvegicus
  Genbank Accession No. AA944828
  misc_feature (1)..(300): n = a or c or g or t
ggggcagtcaaatcatgtgtttattgagtgcctgttatgtgctaaatattgttcaggggacgtgggacccagcagaggacacggggagtcctgccctcgtggagcgtacagtctattgcactgctgtgaccttgggcaagtcactgcacccctcgaccggcccagcagatagacctggacgtggtgcagatgctgaccaggacagcgctctgacccaccaccccagacagcagagagggctgcaggttcatctttaataatcaagtacacgggggattannattgtttggntatcacatg

SEQ ID NO: 836 - DNA, 157 bp, Rattus norvegicus
  Genbank Accession No. AA955358
tttttttttatttttttcatttagacagttttctttaattaacgatgaagacactacagttctaagtaccagacagaattgggagtaaaacaattgaacacaagcatgacactacaaagaaagcttggaatagtgaaacacttcgaaaggaaaaccc

SEQ ID NO: 837 - DNA, 457 bp, Rattus norvegicus
  Genbank Accession No. AA997821
tttttttttttttttttcaattttgccaattttattgaaccaataaaattcctactaataacaatgaaataaattctgcaggtataaacgtgatacagtttaacaaaacccattgttctgtacctataaatagattttcaaaatgtcatagaaagtgcagttatgaattgttaacatgttaatacacagctcctttatttcaggtgtgtttgtcttgattcattaacagttccttctttatctgttcaaataatattacccatccctcgaaaaacaaaaggacagccgcagaacgagaagagaggcgttaaaccactagagtactacacgagctggcccatttgggtcagctttagtcaaactgccaaaccagcaacataacaacaaaaatcaagcctacttatacatacaagaagctctcatgggttctgtcatctccataactgctgatgcatgt

SEQ ID NO: 838 - DNA, 545 bp, Rattus norvegicus
  Genbank Accession No. AA998174
tttttttttttttttttgaattttaactttattatgtctcttgtagggatcacaaacggaactctccaatacactttaattattcaaaggcctttcagagattccattgcgtgaggtcaacactatttaataccatgcaattgtttcctaaaataaggccatctttgacgttagtttgcacacttgttctctgtaaaatgcctttcaggcacaggccagattaatttgctgttatcagcttagttcttaatgcagaaaagtaaatttaaaaaacacaagtctcattattttgtccaagctggcctcaaatccctatgctcaaatgatcctcctgcttcaacttctgaaaaaaccaagcttatagtaagcacccaggtaaattttagtaaacccagtgtacatggtggtatataccagacttgcctacatagcaaattcaaagccagtgtaagccatgcaagaccccatctcaagaaagaaagaaaacaaaaaacagaaaaacctttttagataacaaaaagtggctttgggagtggtggcatatt

SEQ ID NO: 839 - DNA, 577 bp, Rattus norvegicus
  Genbank Accession No. AI169266
ctgacattttattttctgaagtttatcataattttacaaaacagaacaaaacaaaaagcaggtatcaaaaacagcagtttatagtttctgtgctggttctcacctcagtcagcgactctggaattggcatcttaggaagacaaccgggctgcttccctcttggccacaggcattcgggtggttggtttcagaactactttgtaataactttttacaagcaccggtcatttttgagaaccaatttggtttgtccgacaaagtagacacctttcttttactatgcggcattttcctttcttataaaacactgagctgaaacacacactatgtatttggatcagaaccacattttctgagatccccattacctgaagaacactgaggacaccattgggcgtgtgaaatgttacagtgaacccttgtgtaaatgtctaaggcagctaccttatttctgatgaaagcattcattcagaagctgctggagtccattctcccacttgggatagcttccccaggcagccttattatcagaaggaaatgggatgtttgtgccaaagaggcgcttatattgggtaaa

SEQ ID NO: 840 - DNA, 486 bp, Rattus norvegicus
  Genbank Accession No. AI235224
caccatttaagagaaagaaagatggaggaaaggtaaacagtgttcaggcttcagcttttgccaggggaaggcttcgggtcatcgagaccccaaggtattgccaggtgcacaaatctggattccgtggcaggcaggcaaagtgatcgctctggtagcccttctcagagcccatgaggatctgatctgtccacagaggctctccatggctggggtgtaggcgaaccggaaacctgtggcatttcccacagcgtcgaatcctttgagcatcttagtcatcttgatctcataacgctggtataaggtggtctcgatgatttctggggaacccatgaatttagcccttataaccaggtccgagttgcagaaagctgtctgtgggtgggttggggcacagctacaggctttactggaagctatcaatgatagcaacaagaggatgccagaggccagagatgcaaagggcgccatcgtggtatctctagcgtg

SEQ ID NO: 841 - DNA, 502 bp, Rattus norvegicus
  Genbank Accession No. AI170056
tccatttgttgtcgtttttttttttttttgtaaacaaagggttaatttatgatataaggtaagccaataagctctcatgtgctacagagagaaaacatacagtgcacataataaatgaattccatatactgagaataaataggataagcgtagtaaagaggaagtcaagaggagcccacagttacagtcacatgacgagaagttaaaaaaaaaataaaagaagaagtccggggagaaacaactttatttatttggagccatgcacttgttttagtgccaagggcacaggaagatggacaagataaggtcctgatcacaccagatgcttagaaagatctttcagtggctaacctacatctagaagagtcatgaggagtagtggcagggtgtgtgcgccacaacctttgaggaaagcgatccttatacacaggggaaccccaacaaccctgtcattttatcatgaacacatctgcacttcttgcttttcacagacaggatagga

SEQ ID NO: 842 - DNA, 2266 bp, Rattus norvegicus
  Genbank Accession No. D10655
cctacaatgcaggcaggcaccatagcccgctgggaaaaaaaagaaggggaaaaaatcagtgagggtgatctaattgcagaggttgaaactgataaagccactgttggatttgagagcttggaggagtgctatatggcaaagatccttgttcctgaggggaccagagatgttccgataggatgtatcatttgtatcacagttgaaaagcctcaggatattgaggcctttaaaaattatacattggattcagcaacagctgccacacaggcagccccagccccagctgcagctccagctgctgccccagctgcaccttctgcaagtgctccaggtagctcctatcccgttcacatgcagattgttcttcctgccctctccccaaccatgaccatgggcaccgtccagaggtgggaaaagaaagtgggagagaagctgagtgaaggagacttgctggcagagatagagaccgacaaggccaccataggctttgaagtacaagaagaaggttatctggcaaaaatcctggtccctgaaggcacaagggatgttcctctgggaaccccgctatgtatcatagtagaaaaacaggaagatatagcagcatttgcagactacaggccaacagaagtgaccagcttaaagccacaggcaccaccacctgtcccacccccagtggcagctgttcctcccatcccccagcctttagcacctaccccctcagccgctcctgctggaccaaagggaagggtgttcgttagccctcttgcaaagaaattggcagcagagaaagggattgacctcacccaagttaaagggacgggaccagaaggcagaatcatcaagaaggacattgactcttttgtgcctactaaggctgctcctgccgctgcagcagctgctcccccgggtccaagagtggcaccaactcctgcaggtgtcttcatagacatccccatcagcaacattcgtcgagtgattgcgcagaggctcatgcagtcgaagcagactatacctcattattacctttctgttgatgtaaatatgggagaggtgctgttggtgcggaaggaacttaataagatgcttgaaggtaaaggaaaaatctccgtcaatgacttcatcataaaagcttcagctttggcctgcctgaaagttcctgaagcaaactcatcttggatggacacagttatacgacaaaatcatgtggttgatgtcagcgttgctgtcagtacccctgcaggacttatcacccctattgtgtttaatgcacacataaaaggactggaaaccattgctagtgatgttgtttctttagcctccaaagcaagagagggtaaacttcagcctcacgagttccagggtgggacatttacaatctccaacttagggatgttcggaattaagaatttctctgcgattattaacccacctcaggcatgtattttggcaattggtgcttccgaggataaactgatccctgcagataatgagaaaggctttgacgtggctagtgtgatgtctgtcacactcagctgtgatcatcgagttgtggatggagcagttggagcccagtggcttgctgaattcaaaaagtaccttgaaaagcctgtaactatgttgttataatttccctgcgaacttctattcttcctctgctgacattatatttatatgttattaaacaggtggttcttttaaagtttcactagttaattttattattgagtcagtccagataaattatttgtaacagacataaatgaatcttttgtaaatgccagttacacccaaatgttttacccctttaataattacacatcggtttaaagctgtgtactcctagtgaaggggacatgtgggcctaactctttggtagaaggagccttcctgggagtgatagatggcaggattgtggcttcctgcagacaagtcactaaaagtacctggatgagatacttggagttagattaatgatcacttatttaagtgtgagggaacagtcgtgaaaattacgtcttatggaggagtttgaatttacgttggaatctaacagttaaagtctcctgtcacatgaccttagtttatcactcagtaagtgaaacttttaagagtcagcattttcttagacctcttcaaaccaactattatttttatatgaatctctaaataaaatagctttccccacaagataaagatataaaccagcttcttggtataaatgaaattttatgtatttatttataaacaatttcaatgtataacttga

SEQ ID NO: 843 - DNA, 568 bp, Rattus norvegicus
  Genbank Accession No. AA799778
actcataataaagcagtgctatttcagagtatgaaacttacaaattctgtttcaaacattttattgtaagatgttttaactaattacaagtttaaactataacttggtaatttctgttgggcagcgagttgctgcaaattgcttactcaaatgtgatcagacaactccgaatacagagcaaggatcagaaatagggttaagccactaaatggaccttgatcatttcttaggaaaggtacaccacaatttcattagacagcaatacagaaagagttcttcaagtagagtagttctcatttaagttaaccctctctggctatcacaactgagatagacacattcacataattggctgagcttgagccttctttgcaagcatctttagatctccgatgcacttggcaatggtctccttttcctgctgtgcagaaatgctctgtatcacatgcttctccacccagtttatcatgtgctctccctccttgcgacgcatcatgtcctgtacagaaatatggtagtccaggcgattctttacctccttatatgctttatgtagtcgttcccggta

SEQ ID NO: 844 - DNA, 278 bp, Rattus norvegicus
  Genbank Accession No. AI639058
ttgcaagctttctgagcttctgcattcagaccacacagaacatgtaaatatttatacacagaccggagaactagcacacgccttacagcctgtgtgtcccctgccttcctctctcttctctcttaagaagtgcggagtgtttttttttcttttttgcggatttgcctagaggtgccccaggcccccgctcctagagagggtgacctttctgtttctccttctccttgttctccagaggggcaatgtgagggtgatggagccgggtcccttctggtgcc

SEQ ID NO: 845 - DNA, 575 bp, Rattus norvegicus
  Genbank Accession No. AI232272
aaagttagggtcctttattggagcagatgggaaatgggaaacagatgtcttcagggtctgagagaaaacttagaacagaaaagcccatcctgggagaaagaacagctcgtgaagttgtcagggagtgcccaggggaatggtgaaggagaggtagtccccaagagcaccccagcggggccggtagatctggaagatggtgatccaggtggtgagaacaatcacccagaagaggaagcccacagctgagcgccaaacatagcctttgatttggctctgctctgtgtaggctggagcgaagaaggcctctttgaagaaccagaaaatgttgaccaaccaaagaaaaggcagaaatgcaaatccaccaagatagtacttccggcacaggttcaacttctcctcattggacacccgctctaagttcatagttgcgctggagcctggtggcactaatttggcttgcagagcaagacccaaatgacaggcacaagatcacgaacaatcacgccccttgtacgcatgcgctcccaggaaacactcgcttgactgtcggcgaaggcaagttggcccctcgtgcc

SEQ ID NO: 846 - DNA, 496 bp, Rattus norvegicus
  Genbank Accession No. AI045136
tttttttttttttttttccagtgatttctctaaatttttattaaatatctcttttgtctacagtttgatctcgtggaaaggaaaggctgaagatgaaaagtcagttacatttgtcgaagacagcactcagtccttgttacagagaaaagcaaaagatctgtggcacattatctttggaaagatcgtttgcagatttcctttaaaagacctcacaggtcatgtctgcccctttcagagtgtattccacaaggcagataaatcctgttgaccgaagccccaagtttgcagttccattgctgaagccgattttaaatctgtggtgttcccctggtttgtgtcacacatctttgctgggagcacagttgcctccccagcctgcacacacaaccactgatcatagccggcacattattccacggtaatcaaagacaaaggcagaccagtgactttcattatcaccttgacaacgtattcctttttaaagcaattttaatac

SEQ ID NO: 847 - DNA, 506 bp, Rattus norvegicus
  Genbank Accession No. AI232408
cccagtgaagtcatctttattgcatattgctatttaaaaaaatgtacagtctcatagcacacacgacacctttttttcccttggttctgtaacaacagtcttgcatctaaagactaaatgggtccaactactaagctagtaagatacgagacattgattaagtttagaaattataatgcttttctttttttggcattatttaaaaaaatctttaaaatacatactcaagagagaaaagtgactacttacaccagcaccagtctaaaaagtccatttttttttttttttgtaacaatggcacatgaagttacctgcacagtctttaggaaaataaaccggaagctgggaagggcaaaggtggcctaccaggagggctacatggaagtgaggaggattctaagaaaggcaaggggacatgcgacacagacttgctctctggtgtgagtctctttccacagttccaaaactgagctggaccaaacttttcctgctatcaatagaaaaga

SEQ ID NO: 848 - DNA, 503 bp, Rattus norvegicus
  Genbank Accession No. AI136555
tttttttttttttttttgtcgttcagtgtacatcaggtacttgttattaattctactggataagcacttataaataaaggacagttatttcttgtcctcagccaccttcctttgttaagagtcatcatagagagggttgttgtagtttccccaggacccgtagtcatggtcatccagcagccttccgtaggaggaatgcctgatcttcagatatgccgcagctccaaacaccagcaacaccacagcaatgactgtcacggtgatggcggcgatgctgcctgaacttaaggcattctcgacttcctgcatgatcaggaagggggtggtggtctcagactcacagatcactttgccaggctcagtgtcttggggtgatttctccttgggcacaggctctgtgacatgggaagtgggggtgtgactagaactgtgctcttctgttggtgatgcacgtgccattggagctcctgtgggctggatgttgttcacagtagagctgtggt

SEQ ID NO: 849 - DNA, 507 bp, Rattus norvegicus
  Genbank Accession No. AI179507
gtaagaaccactttaaaaattttattcataaaattcaagttaaatcatacatgcattttggtgcaggatacatcttacatagtacaaaagatccactgatttctgttctccagagcactttgtctgagggagtaatgcaacacacatggtcaaagaagattttacctgtcgaatatggaaaactaaagaaacacatttgaatatatcatgacatgtttttctaggcaaaatatttttctttttataaattaccaattttaaattcatccaataataattatatctttgaaattactctccttctttataatattgcaatctggcaagaaaggaattctagtatacttggcaaggtataagtattaccccagtggaatgattgaataaagtgttcataaatcagcttcttgtctcctggaacctaaaatttaatccaaatctataagttcataatgaaatggttttgccatgttgatgctgagacacgttaagattgcacacgtatat

SEQ ID NO: 850 - DNA, 395 bp, Rattus norvegicus
  Genbank Accession No. AA849426
ggcagtccccagcacacttctttattgaatgcaaaggtatgaacgtgtaattacaagacatacaaacaaagagcctatgctgatcccctggggtggggtagtaactacctttcctgggacatgctaaaggcctgctgctcatccagttgtcggccctgcttttaacagggtctgttgtccatggcaaagcagctgcctttttgtctgcactggacagcagcagcagcagcagagtctgcagtgctctcttcccagtcatggaggctgtgggtccctgtccctgcccacatcctgcctctgcttggctgagcctgaaggagggcacgacaccagttagcccggcccaagcctcatctactgcagcccagacttcatcctgcagtaactactgtacg

SEQ ID NO: 851 - DNA, 447 bp, Rattus norvegicus
  Genbank Accession No. AA848218
  misc_feature (1)..(447): n = a or c or g or t
tctcagctactgtatgcgaagtctgattatattggtgcgtttttacagttagggttttgcaataacttctatattttaatagaaacgaattcctaaaatccctcctctccccaatttcaggaatttaaaattaagtagaacaaaacaaaaacccagcgcacctattacagctgtcatccaccgtcatgggaatcagttttcattaaacttgaagcagttgtggcatcatcggcagtgttttggttcagacacctattcacagaaaagcatgatgggaaaatatttcctgacttgagtgttcctttttaaatgtgaatttttatttcgttttaattattttaaaatatttaagccttcttcttgatcttaaagatcgtgtagcttggggttggggacggatgaanggcgagtgagtctaaggataatgaaataatcagtgactgaaac

SEQ ID NO: 852 - DNA, 236 bp, Rattus norvegicus
  Genbank Accession No. AA900331
tttttttttttttttttggtgtgttttttttttttttccttttttaaaaaaatgagggcatagttgggggcagggtgggtaataaagtctacctggcaaagtataaaacaaatgaagcatggtctccatcgaataagattaaatagataaaaaacaattaacgtcgactggtgggtctggtttggaggtgccagggaggggaacgatttgtgctaaactaacataaaaagggctgg

SEQ ID NO: 853 - DNA, 1083 bp, Rattus norvegicus
  Genbank Accession No. D00729
acacaactctcaatcatccagtgaactgggctgactgtggcaggacctgggcggtgaggaaacccttggggacaccgatgtggcttgagcctgctcctcttcttggcgctggcctctcccgtcgcgttctgctgcaggccggatcccgcctcgccgcaggggggcctggacgagcccgtcgcttctctaacaaggcggtgttggtggagaaggagggcgaggcaggaatcgcagtgatgaagttcaagaaccctccagtgaattcctcagcttggagtttccgacagagttttcgtcatcagcctgagaagctggaaaatgaaaagagcatccgaggtgtcatcctcacttcggagcgcccgggaacctccccgccgccccacgacatgaagaagaaggacgaccagcccactatgctgagtactggaaggctcgtgccaggagctgtggctgaggctctacttgtccaacctgacttgatatctgccatcaatggcgcctttccagctggaggctgcctcatggctctcacctgtgactacaggataatggcggacaactccaagtataccataggattgaatgagagcctgctgggcattgttgcccccttctggttaaaagacaactacgtgaacacatcgggcaccgagcagccgagcgtgcccttcaactggggacgttttcccactaacatgacagcagctgctctactgacgcttcacagaagcctcaatgaggtggtacctgaggatcaggtacacagcaaggctcgctcagtgatggccaagtggtttaccattccggaccattctcggttgctgacgaagagcatgatgcgcaaggccacggcggacaacctgatcaagcagcgagaggctgacatccagaacttcaccagtttcacctccagagactccatccagaagtccctgcacgtgtacttggaaaagctcaagcaaaagaagggctgacctaagggtgccacacggtgtttagttacacgtgccttctagggacccatggtcccaaggattatcaataaggtatttttcaatttaaaaaaaaaaaaaaaggaattcc

SEQ ID NO: 854 - DNA, 444 bp, Rattus norvegicus
  Genbank Accession No. AA964501
tttttttttttttttatattccaactgatttattaagatgcattaatattatggtaatacgtgtaacaaatgaggacacaccactgtattccgaacaagtcaaaggaagagaaaatagcacactttgcggatgctaaagagctgcttctcactgcctagaactagagccgtttcccgaagacagacagactgaattctcactgaaatgacaacactagagtcagtactatgtaagaacagcaaaaaggtcacagtgagttaattttgtctaagtgacagcatgtgagctcctaatgaaagttgttttgaagtatgaagcaaagtgcaacagtgtttgatcaactccgaattgtgttctatgtgaacagaaccccaaggactgggcaagctggcagccctgaacaccaatatttactagctgggttttcatgagtaaacattgta

SEQ ID NO: 855 - DNA, 398 bp, Rattus norvegicus
  Genbank Accession No. H32747
ggcaagtacagttttaatgttgattacagcagtgtgtgtctttatttcctctgctagaatagaaaagagcccaatatattcctcatgaatgctctctgaacctgtgaacagcatcatggttctaccccaccttctgaacactcgggaattgggcttcctcccctcccctcccctcgtagacagcagtgtttggagtgataatagtagcttgatagctagattcctaaccctggcttttattggctttttgaaaaactgtcttcctcctgattccctaagtgggcttggtgtagtcacttggtgggatgttttggaaaggacagtaactcacctgtgagcttgtggaacttgtgttttctactgtggacattgaaattaaaggattgcttaactgtcag

SEQ ID NO: 856 - DNA, 310 bp, Rattus norvegicus
  Genbank Accession No. AI072144
tttttttttttttttttgccttaaaaatacagactttatatatattgtgaccattaggtgctcccaatttcaaatgattacatataagagagatcgaatccttgttgcctccttttggggcaactatggaaaggaacaccatttgtttttatggctgctggagaaaatggagtcaacccaacacttctgatgccttgacggagaaaggggtgggaagctggtggaggggtagcctgtgtgctgtaggctgcaccaggctggggcctgtttgttgccttggaatggcctgtttgctcctccgtaacgccca

SEQ ID NO: 857 - DNA, 579 bp, Rattus norvegicus
  Genbank Accession No. AA800298
acccggaaaaagatgtctttatgttcttacatggaaaaggatatcggggtctatagcatgatgatacagacttttcataaaattcatctcaacgaatctgtttcagctgcagtcataattcaagacttgtcaaatggaaatcttaagatcggcgcaggggatgggaagggggagcgttgggggaaggtcaagattctgtgctgcttcttcctagaattttaacttcccagcgagtcaggcttacatcggcagatgccgcactcaactatgactgggtagacaggcagaaccctacagcatgaaggcaataatgttttaggggaccatattaagtcccgatatcggaggaaacatgagcaggatctttggagcagctctctttctctggatgtatggaaccgtgcgtggtatcgccaggcgcttggttcacacatttcttagggagggagctatgtctcacatatctaaaaggtgatgctgttagcaagcgcaaaggacatcttaccctcgacagccagggttggaaggaaggaatggctttctgaagaacgcacggggcaaccatgccggcccctgttt

SEQ ID NO: 858 - DNA, 585 bp, Rattus norvegicus
  Genbank Accession No. AI230716
atgcaaaaatttatttgaccaaaatgtagaaaaagtgataccattacgtatgatacaatcgcaagaatctaaagaacagagtagattttatcaattgcacagtttgctaaaagttcatctccctggtagtgtgatgcttaataaataggagtgaggggcagggttcagataagctataagcaggtgactctccgtcagcactgtaaactcgaggtggccccacactgctggggaatgtggaatgtttcagggagatgttaactgaaaaagcaaaactacaatgccaaaaaatatgtgcagcctctagagcgctccacgtccagttcagtcaggagttctcggactgtattagtgtcattcccaaaggaattcaagtctcagcaaactcaagctcccatttcttgatccctgaacaatggatatgaagttaagccaattgctttctctatcactactttgcggctggagagaccctttgttgcctaacccttggcatcaatgttctgatggctggcaacctgcatattatttgagacagagtctcgctgtgtatcgctggtacctggctttgctagcagtcttgat

SEQ ID NO: 859 - DNA, 300 bp, Rattus norvegicus
  Genbank Accession No. AI029026
tttttttttttttttttgcatatttggatagttttaatcattagcttacgacggtatgctgccaaaacccttttctatccttgcatttttcagagggagaatttgccaatgacgaatcacgcgctcagaccttaagggcccctctgaactcgctaacgcatttcaaatgggcaacactagccggtatcaaagccggagggggtggcctggatccagaactgctgtgagccagcatcccagcagtgaacagatggcacacgctcgacaggagagaatgacgatcgtggagagtcctgagca

SEQ ID NO: 860 - DNA, 537 bp, Rattus norvegicus
  Genbank Accession No. AI012962
gaaatagcatctgatatttattcaaagtgaggaaaaggattctgtacaggtagagcagacaagaaggaaagagtccaggggctactgtgttgaacaaaggcacacacatcacagagacagctgcaaattgagaaagaaaaccggcctctcaggaaaaccaagtggtccacaagacaaaatgagagacaagaggtttctgggaccagggagggaatgggtcccgctgaaggtgaatccatgtccatgggctgtgggaagcccaggtacctcccaggtgagtccagatcagttaagggcagcagtcagtccacagatggtttgtgaaggggtttgaaatggcagagtcagtgcaggcattgaaggcaggtgggtacagtctgtccatcatataggaggcagtggacatcgtgatctgtccatcaggtggcaggtgatttgttcattaggtgacaggagcccatcttgcagctggagcccagtacagtgtccaaatatgtcagggttgggctgaactgtcaacagtgggaggccttgtgg

SEQ ID NO: 861 - DNA, 496 bp, Rattus norvegicus
  Genbank Accession No. AA850916
caggatacaggcaagctgtcgtgggttttagagaagactatttaagtgagaaggtggtcgctatgacaactgcagaaacaactgtagtttctcaaagctgactcctgctggttctctgaggaaatgcaggtagaagctgatctgtgtatgccacagcattgactagatatctaatagggtctcttctcctggaggcatcgtagcctgggactccttagctacaagggacgctgccccaggtaggacctaagtactctctcatttcccagggcctggttaacccacgggcaatagggacctaccaagatcacttgtctattccaaccctgactttattccatcctgaccctagcttcccctagccttcctaaggggctctagatcaccctgatatgtgggtaaatctattaattatccccaaatcgcatcatcccttacctttaacaacatcctggtacttttttccccacctacatatatgcgtgcctcatcaaac

SEQ ID NO: 862 - DNA, 561 bp, Rattus norvegicus
  Genbank Accession No. AI169311
tacacaaaacgagttcaacattcgctttagccaacccccagttgtacaaaaaaccatctattctgggtgtgaatctggttcgaagtctcctaatgctggccaatcagacccataggggaaattgccctacagagggatgaaaagaaatgacaagaaaggagcaataaatttcactgctaataaacgattgctttcctgctaaacaaccaccaatggccttccttctagccattccctcattgtcatggattcaatgcagggttcttcgccttccttcaggccgctgttttcttgaacatggtccctgaagtcttgaagcctcaattaacccattgtgaaaataggaatggtcatagccctcaccttgtaaagatggggtgagggttaaacaaagggtacaggagggctctttggacctgctgtttggaaggcatggcgttactgttagatgttaacacggacacctcactccctagggaaagaattggcggccaggagatgaagatcttaatccatgttcccatgcctcaccctgagtgtcctgctggcgtccttccacca

SEQ ID NO: 863 - DNA, 420 bp, Rattus norvegicus
  Genbank Accession No. AA999110
tttttttttttctttttgtgcagtactttatttctcaaaggagttgcaaagggccaggcctcagctattctgagaagcactgatttgggtgctttatagatctgttatcgtctacagagttcatgcttcaaaactgtataattgagtcacaacagatttcaaaagcttatctcaatgtcttcagtaagtttacagctttgcaatgggccacattcatagctgtcctctgtcacatgtggctgcatatactgtgcaggttggaaatgcctgtcttagggtttgaactctgagcagaagacgggaccagaatatgccaagaagcattgggcatattgcagtgactagtgtcctcagtagccaaaaaaatggtgcaagtctgtttcggttggaaacgaagccaaatgtgtaggcagatgtcat

SEQ ID NO: 864 - DNA, 773 bp, Rattus norvegicus
  Genbank Accession No. L20869
atcccaggttcacaagacagacaagatgctgcctcgtgtagccctcaccaccatgtcctggatgctgctgtccagcctgatgctcttatctcaggtgcaaggtgaagatgccaaggaagatgtgcccacttcacgtatcagctgccccaagggctcgcgtgcctatggctcctattgctatgccttgtttagtgtatccaaatcttggtttgatgcagatctggcctgccagaagaggccatcaggacaccttgtgtctgtgctcagtggatctgaagcttcctttgtgtcctccttgattaaaagcagtggtaacagtggccaaaacgtgtggattgggctccatgatccaacactgggccaagaacccaacagaggtggatgggagtggagtaatgctgatgtgatgaattacttcaactgggagacgaatccttcttctgtctctggaagtcactgtgggaccctgacacgagcctcaggatttctgaggtggagagagaataattgtatctcagaattgccatatgtctgcaagttcaaggcctagagtacagagatgacaccatgtgttgatatatacctcaccaaatcaagaaccccaatgggaagatcaacaacaacaacaaaaagaatattctcctcacagtcaacatctgacctcctatttttctcctcatctgccccttccttcctctcatttgaggctcttctgtgtgtactgtggcctgagatctcacagcacaataataaaatatataactcacgctcat

SEQ ID NO: 865 - DNA, 437 bp, Rattus norvegicus
  Genbank Accession No. AA801255
gctgggtatcacttgaaaacttgtccctgtttcaagggcgagttacttaagacaccagcttatatatagcttctgtgagtctggcttctgcataaactttgtaatgtttgccatgaggtttagtggaaaatgttcttttgtctcaaacttggatattgctacctgaagtaataaacaccccaagccagaaacttggtcagtgctggcaacattttttgagtgtttgtgatccaggaatcctagagtgaccgcctgccattaagatttttccaaggacagagtcatcccaaactcttgtttaattaccagataaccagattctttatcagaattatggaataaaatatgtactgtaacaaataatttttagaagaaaactgtttaagataatgctcttaacatttttttttgcaaacattgaagattacattgaagaa

SEQ ID NO: 866 - DNA, 301 bp, Rattus norvegicus
  Genbank Accession No. AI071926
  misc_feature (1)..(301): n = a or c or g or t
tttttttttttttttttgatgaatcaatgagctttattggggttacttataggtgaggggttacttanagcagcagaaattattcaaagacagtttcatgaccaaaaatccactctaacatgggcaatggctcaaaaaagctgtaacccgaaacacattgcacagcctgtagacatctcaatgggtgggagtgttcttcccaggtaatttggttggtgtgagtctcttctgggttgtgtgcatgcgtgcgtgcttgttgagtgtcttctaggctgatcagcttgtttaattgtgtctctca

SEQ ID NO: 867 - DNA, 554 bp, Rattus norvegicus
  Genbank Accession No. AI235358
agaaatgtacttttactgtaaacggggcaaaatccagactgttcaattgttattatcccaaactgagcaagttttaaagttgtttttattttaaaaagccatcagtaataatctggaattttttacttttaaagctgcttagcctcaattttaacagattctgaaatttcttaattgatgtaattagtgaacttaattactctattactgttttctttaaagcatttaataaatacctgttgactgcctaggaagagtacaagaaaaacatttacatacaatgttttattggctctatggcagctaggaggactatacttttaagtttttttcttcattgagaaaaatgttgaattaacattaataattaggaaacctgactctgatgtgtttgctggtctgggctgagacttggatacatgcatctgttataactcgtcaagaaaaggcgtatgtcccaagtttccacttgctgtcattgacttcttgccagaaacaaactttttcgcagcctttacaaaatcggcatcagccacagcgtcaatttgctgaag

SEQ ID NO: 868 - DNA, 398 bp, Rattus norvegicus
  Genbank Accession No. AI058398
ttttttttttttttgttcaaagaaacagttttaatggtaggaagatgctttcacttaagggaagctcactgaacccaagcccttagacccggttcacttgcaggtgccatgcttctttgcttcagagctgaaagggtttggccaagatcacacagttgaacgtgggcagctggtgccagcacttccgtctgctctcagagggcggagagcaggtgccccactctgtgctgccccactggctgctctgggagaggaggaattggaagcatttcgaggatgaactcagcacctgcgctcccttgcctcctctaccaagagctggcagacttgtgctgtaacctagccttgctatgctcagccaggttttagcgttttcccaagcccatcccctgtcccca

SEQ ID NO: 869 - DNA, 539 bp, Rattus norvegicus
  Genbank Accession No. AI232103
gaaatggcttcagatcacacattgtcacagaaccagccccattggattgtcccaatccttggacgcagagcccgaggcaggcacagtggctttgattgaccacttgtggccctgagcacacaagtccctccacaggacaagtgcctttgcgcggctgctgagagatttgcggacttcagactgaagagcgaggacaaggctcttcttgggcttggctggggttgggttctgctctggatgggatctcaggggtcaccagagaagccactctgagtgacaagccccatgtcgtgtatggccctcaggaaaaaaaatgagcaccaggctgaatctggccacattcctggtctctgcccacggtgacaggaaacagggtcagatatggggtcactgtgaacttggaaacctgctctggcaggaagtgggggagttgggagagttgggtcccactcctcaagcatgaggagagccagttaccacatggatgagcaggtgcccgcctgtacaactggccacagtcactggacggtgaaagggga

SEQ ID NO: 870 - DNA, 853 bp, Rattus norvegicus
  Genbank Accession No. M63983
ggcacgagggacttacctcactgcttttcctagcggtacgacctcctccgccagcttcctcctcagaccgcttttcccgcgagccgaccggttctgtcatgtcgaccctcagtcccagcgtcgtgattagtgatgatgaaccaggttatgacctagatttattttgcatacctaatcattatgctgaagatttggaaaaggtgtttattcctcatggactgattatggacaggactgaaagacttgctcgagatgtcatgaaggagatgggaggccatcacattgtggccctctgtgtgctgaaggggggctataagttctttgctgacctgctggattacattaaagcgctgaatagaaatagtgataggtccattcctatgactgtagattttatcagactgaagagctactgtaatgaccagtcaacgggggacataaaagttattggtggagatgatctctcaactttaactggaaagaacgtcttgattgttgaagatataattgacactggtaaaacaatgcagactttgctttccttggtcaagcagtacagccccaaaatggttaaggttgcaagcttgctggtgaaaaggacctctcgaagtgttggatacaggccagactttgttggatttgaaattccagacaagtttgttgttggatatgcccttgactataatgagcacttcagggatttgaatcatgtttgtgtcatcagcgaaagtggaaaagccaagtacaaagcctaaaagacagcggcaagttgaatctacaagagtcctgttgatgtggccagtaaagaactagcagacgttctagtcctgtggccatctacttagtaaagctt

SEQ ID NO: 871 - DNA, 434 bp, Rattus norvegicus
  Genbank Accession No. AI010195
aagcaataatgacaggttttatttaaaaatttccagtagagaaaaaccctgctagtgttggaataaaagaactcgctgtataagagaaaaggagaatagaaaactttaacagaagaaaaccaaatagtacaaaaaaaatgaaacaaaattaaaaaaaaaaaaaactttgaaatggattctgatagagatcttcttcaaacctgcgaataatgaacagagttaccaggtttggcaaacaatttatttgaaaaatcaaagcctatgtctgtattgtaaacgccataagaactgctcgttaaatccacgcttttcatgttccgggaactgggacgcagagccagtccgtttgcgaacagaaggaattactcatttgcccttacagttagaggaattaaccagctgcttaactgcattgtggagcggatgatacagcc

SEQ ID NO: 872 - DNA, 492 bp, Rattus norvegicus
  Genbank Accession No. AI010169
atcttttaaagtagtttaataaactccacaaaatagtatcaggtgcatttaactatttacataagtcaatttccaaatctcccattcaaataaaaggaataaaaataagatttctgctaccaagtcagcagttctttcctgaaatgggctggtaaaataaggtactttacatgagaggaaggaattaatctaagaggtattcatatttggctaagaaaataggtcccttttagagttatagagatgagggaatacaaaatgacactttctacatttttagacctctgtttacggttcctaaggagagaagctgatcctgtttcccactcagagcaaatcatcaaagacgcaacaggaggggttaatttttacttcctgctgtggaagtttgggccagaacttgcttatcctgcatacagaactgcacaagacacactgcatcgaatcctgactaaggtttgtggctctatactctggggattttgacatttg

SEQ ID NO: 873 - DNA, 313 bp, Rattus norvegicus
  Genbank Accession No. AI044425
tttttttttttttttttccagaaataaaagcgctttaatatctggaccacccagatgaaatgtcatggcaaatctcataaaaacccagagggagcagaaactgatactaggggaaggaagggaaaccaaaaggcactgagcatgcttggcggggcaggaaaggacactgtcactccagagacaacgaataacaaagggacaggagccatccgggccagctcggggggcttcagaagcgggagacaagtctgagtccacaaaccaagttctctgcggcttttcaagaaagaggatttgcttgcaagatgcatga

SEQ ID NO: 874 - DNA, 523 bp, Rattus norvegicus
  Genbank Accession No. AA963324
tttttttttttttttttgatgaagaaaagtaatatattattttggtacaaaaaagttaaggagaaaaagcagaagtggcctattcgaatgtttccctcctggagggaaaactgaggtttccaatataaacagggctgtacagagacaagaagattaaaagcaattgggcttggaggttctggttgcagaaagcactcgatattcttcaggagtgagactggcggtgcccaacaagagcatcagtctcagagctccactctgggtcacccctctcctggggctggtatggtgtcgcttgaaacttgcactgcatgacctggagcatcaaggccagacaccacaatatcagattcacccaagaagaggtttcagcattgtgtaggttggagtaaaactgcacagcagttcctggaggtttccatgagattttctgggcttcagagcagctaattgtatgattcaaggagatgatggaattgcagaaagaattggtgccaaatcgaagtatacaggcagacactaa

SEQ ID NO: 875 - DNA, 319 bp, Rattus norvegicus
  Genbank Accession No. AI045128
tttttttttttttttttcctgtctcccccaaaatatgttttattcttgcattacatttgtgtttccaattgtgaataaaaaaatggttagaaagtggttacaaaacagcgtgaatggactagaggggtggccgccctgggctctgctgcttcttcgcctggatgatgcagtgtaggcctggtgtacgggccggctcagtcgggcttttcactctcaggatctggtgtgggcacaggcagggctggggtgactccaggaatggctgtgctggacagagggccaggtgctggggccagacacgatgttgccactcctcctc

SEQ ID NO: 876 - DNA, 516 bp, Rattus norvegicus
  Genbank Accession No. AA819523
tttttttttttttttttcagtttagaggcttgtgtttattttaacttagacaaaaatcaggagtaaaacgtacgctcttaacctgactctggcatgaaactggtaccacctgttctaaggtctgctttattcaaggattgtcagaccttcatgaaaagattcctggatgttctgctttgtaaaagtaactgggaaaccatcctagtagatgcagaataaattaaccccaagcggaggtgtagagcaagatgcccacactgcctccttccgtgcctcagcttctagtctccacctttgaaacgtgcatgacgtaaagccatgctatgctggccaaggaagatcgtgtcagaagtagggtgacaactggacatagagacacataatatattcatatgtaacataataaatgtacatgagtatcatacatatgtatatataggtagcccagacttgccccacacctctgcacaagcagagcctggagcagtctaccggtttctagactacggcggtata

SEQ ID NO: 877 - DNA, 472 bp, Rattus norvegicus
  Genbank Accession No. AI070775
tttttttttttttttttgtttcaataagtttattgtgaaattcaaagcttccacgatagcgtcctttagaaaatgaaagcattgcccgggatccgtttttgaaagagcagtgcagtctgctaagtccggctcgctcctgcagtggagcacaagtagataaggatgtgacacgggccaagtctggaagtcacaggaaaggaattctgaaggacctggatgaccccacatgcggcaacaggcttgtctccttgtcttgcacttgcgggccctggacaccacatgacaccaggaggacaggactggaacagccgatgtttccctttgtctgggccaccccaaatgcaggggagactgatgattgaggtcacagaataggaggtcacagcatgggttcccaggatgggatactgctgttggcaggcctcaaacctgcttcagacctgagcacggcatcctgacagtgcaatgggca

SEQ ID NO: 878 - DNA, 688 bp, Rattus norvegicus
  Genbank Accession No. AI170379
ggttgcatcgagtgcctcacagacactataaaaccaaaacggaatagaaacatctcggtggttaacagaacacaggaaagccaggtacagagtataatttgtcaaacacaatattgctgctccccgccccacccccacttcctccaatttataaaaagaagaaagaagaaaagaaaaagccatttggataaagagcaacacaaaatcaaaattggcagctcactgaatgcttaaaattcaggaaatcgtttttgtaactgaaactggatacattcaccatttctaacacttaggctatttttttttcaatacatagtttaagtccattcttcaggtgaaaaaaaaacatgtctttaaacacaacaatcaacactgttttggtgttccttgtttgtgtgtgtgtgtgtgtgtgtgtgtgtgtgtgtgtgtgtgtggacactgatctatatactgcttctatgccattgcctagggtgggcagcatgcatgggtaagaggaagggacatgcactatgtcatccaagtgccgcccagcctctgccacagatgacagaccctgcatccctcatttctagatgagaaagccaaggctgtcaagtcataggctctggagggaagtgcgagtataaacactgcagtgtggaaatccttcaagaaggtttttaacatctacagaagctaaacattt

SEQ ID NO: 879 - DNA, 481 bp, Rattus norvegicus
  Genbank Accession No. AI043695
tttttttttttttttttcacgtttattacatatatttgttgcaaaaaaacaaaaaaccacacaggcacatacaaaacaaaaagtaggcttacattagtttaggacgttaactgtcttcaaacacatttttcatcttcttttcagcatatagtactctagttatatacatttaaagcagataaaataaggcttgaaactggtaaaatgttaatttaatccatattcagaaacttgtaaaataaaaggtaacaatgaagaaataattaagaaagttgtacaaacgaccatggttattatttccctttataaaagtattccaataaaacaaaataaaaactgtggaacacaaaagtcaaattagagattttggttgtagtaccttccctgagtttctttgtaaaacatcaaatttaaataaggccatttaaaaactgacctaacggccttacccctccacgccgccattacacacaatgcatgt

SEQ ID NO: 880 - DNA, 396 bp, Rattus norvegicus
  Genbank Accession No. AA818929
tttttttttttttttttccatctttaaatccctttattattaagactaagaatccacaaaaggacacctgaatttctccacagcagtataatagaataatatgaataaaaaagcattgtgcttgtcttcatgcagatgttatataacagaggcagagaagtagcgcacataaaattaggtgtaaatgtctaaataggcatcggttaggtctctattttccaatttttcaaagacagtatttaaacacacttcatatttataattcactctccttacttttgaacccagatgcaaattttagttcataaaactgatcaactcaacaggaaaggaaagttaaaagttaaaacgtgagattttatttctttgaataatttatttgagtttgttatttta

SEQ ID NO: 881 - DNA, 444 bp, Rattus norvegicus
  Genbank Accession No. AI058890
tttttttttttttttttaagcatgggagcacattttaatcaagtgggcagttgtagttttaagtcagcactaaaacctggcaatgttagatttgtgttttcgtgaggtctaaatgtcatcacagagaaccacaggccacagagagaatgagatgtcttcaagttatgttgacctgatctcagcaaacacagaccggcggcccggtggcttgcggcgctccagacttgggaacagcccccttgtatatggaaatgaagtgggcggggcattgagttccctggggctgctcgcagctgctgtcgtggaaagaagcaagggcaattcgataggtgggtagaggaggcgggctgggaaacgtcatcatctccgcgtttgttctaaagtgacttagagacggtcatttattatggaaacacaatccccgaacagtttgctctttctctc

SEQ ID NO: 882 - DNA, 452 bp, Rattus norvegicus
  Genbank Accession No. AA998256
  misc_feature (1)..(452): n = a or c or g or t
tttttttttttttttttgagttcactttgttttttatttgtctttatttacagcaaagtacatagggtgtggtcatttcatagcactaacaaaggtanggcagtaaaaagcaaaggggaagaggcagcatcttctagggaaaagaacagcctaggtctctagccactcaacctagctcctgaggcaggcctgggtgggaactcactgcctgagagaaacaggaagccgctgaaacacgtcacctgtgcctggcaccgtgagaacagagcaggcccagagccgaatcttaaagacttgcgtacgccagacgcattcaattgtgcctttcccaacctgctctcttccttgttctgacagaaagcatacagcaattgcctggaggaaagaataaacctcacgggagacacaggcggccagctggtccttcccagaaagcatgggtctgcatgttc

SEQ ID NO: 883 - DNA, 418 bp, Rattus norvegicus
  Genbank Accession No. AI060016
tttttttttttttttttaagttttcttgaaaagtgtttactttaaacacttaaagaaaaatataacttatctacatgtttgaatagtctagaaggaaaaacaaagccaccgtcaagaccctgtggagttgaagaggacacggaaacgtctcaatgaggtaatccttccactgtctctaaaagtccgacagaaactgagtgagctcacgaggacagatttttcaaaagcggttctgaactatgtcttctagaaaaccacagcttggggatcattttaggaatattcgcacagcacaatgtttatgaagttagcctccattctggtgcactcaaactttacagcatttgtgattttagtttattaaaatcgtcttataaaaagataagactacacatatttttccaatgcttacgctcac

SEQ ID NO: 884 - DNA, 494 bp, Rattus norvegicus
  Genbank Accession No. AA964496
tttttttttttttttttgttactgcagcacttttatttctctttacacaatgacgtgttgctggggcctaatgttctcactgaacagtagaaaaccaaaatttgtcatttcttaaagaattgagtacaaaaaccttacataaattaaaaggatgaatacatttacaggtgtcgatgcaaacgttcccaactcaaggcaagtaacaacccatggaggtcaggagggaaaaaaccagaacagaaactgggtcctaaggctcggactttcccaccctgttagactggcaagaaaagaagtggtaactagttcaggaacccttgccagcctcgggaaatcctggaagtctgctgttggttaataccaagggaacagttaacttgaatacaaggtcaaaaatcagcaacaagttctacgatccagtgctgatatcagatacaagcttcaaggacaaatttcttttcaaaggcttattccagtttcatgaggctagcatg

SEQ ID NO: 885 - DNA, 424 bp, Rattus norvegicus
  Genbank Accession No. AI233407
gagttctgaagatgctttatttagaaaaataccaatactgacttaaagatttttaattttttaaaatagcgccctaatcagacagctaattctgtatactaaaagtatttacacatggaatacgaaataaatacacagtaactaaaagagatagttatccatggattcatttggcaccccctctgctcatcttctgctgcagtttccgatgccttttgtaaatccttctctttctcgctttcagatccacttttggctctggtttcacccattgtacttctattggtttctcctctgctggtgtaacaaacacatctgcagtgggatcgtgtggaagaatagtctttggttctttcttccttaatttctgaacatctttgacttgctgtttctctctgtacttggcagctgtgatggaccttac

SEQ ID NO: 886 - DNA, 612 bp, Rattus norvegicus
  Genbank Accession No. AA818910
tttttttttttttttctctttttttacaaaaaaaagaaaaaaaaaaaacacttttattttccacaaggaagagcaataggaaaagtcaaatcatttcccacatggttttcttaaaacagagcctacaaggacatattcagcaccaaataaaagattacaacagccatagaatataatctataaagcaaacatttaatattgcactttgtttcgcaaacattttggattttacttttcctaaatgaaaaattaggaattcaagatagcttgaatactagagcgcaactgtgaccctcagatgttatgtcaggaattgaccaatatttagaatagtgtaatgcctcaaaagagtaaagaaatacttaatgggaaaaataaaactttacttcaccaactcttaaaataattttgtcaccaatgccaattatcagaatattggtcattcttgcttaataaagtattttgtagaacatggtagtgagcgccccgaggccatgcacaccaacaattgttccctagtcagacataacacagagtcaggtgtttttacacaatccctcccaacaaaaacaaatccaccaaatgccctttatgccaaatatcccatcagct

SEQ ID NO: 887 - DNA, 593 bp, Rattus norvegicus
  Genbank Accession No. D13124
gcccctcacccctgaaaaatgtatgcctgctccaagttcgtctctacccgctccctgatcaggagcacctctcagctgctgagccgtccgctctctgcagtggagttgaagcgaccacagatgcccacagatgagggcctcagttgcttggcagtccggcggcctctgacctcgcttatccctagccgcagcttccaaaccagcgccatttcaagggacattgacacagctgccaagttcattggagctggggctgctacagttggggtggccggttctggagcaggaattgggactgtttttgggagtctcatcattggctatgccaggaacccctctctgaagcagcaactcttctcctatgcgattctggggtttgccctctctgaggccatggggctcttttgcctaatggtggccttcctcatcctcttcgccatgtgaagcagctgtctccacgtccacctcccatggttcttccgtgtctcgtctgcccagtgtgttccttttcctgtgcctccccaacaagtctggggaaagtacttggctcagggtttgacagagagaagacaaataaatactgtattaataag

SEQ ID NO: 888 - DNA, 514 bp, Rattus norvegicus
  Genbank Accession No. AI105268
catatatctttatattacataatagtaggaaactaacacaattttaacatttcttaaagtctcagctagttcaacggaatgaaattgtaacaaactgtttcaacagacaacaatgtaagcaatggttagctctcagaatttagaaacaatattttttaaatgttttgtttcctggtcatttcattttgacatgaaaagagaggaggcctctgcttccctgcaacactaagggctgtgcacacgtaactgtggtgcacacgtaactgtggtggacacgtaactgtgatgcacacgtaactgtggtacacaccttgcacttgggttgtaaggtggattgatcttcaccaaagtaaaacaaaggattatgggacaacactctagctgtaccttcgtggacggcagcctgtgaaagctgcccagaagaccaacctgagaccagaaccaccaggctgtgttcgtaccacagaacatcacccctcaaaagggtgacaaaacacaggacagaccttgcaac

SEQ ID NO: 889 - DNA, 558 bp, Rattus norvegicus
  Genbank Accession No. AI178025
aaagaaaatactttattacatcatgaaaaaggtatccaacaactagattcatacttgcttgaatctataaaaaaaaacaaacaaacaaaaaactgaaagtttattcattagactgtatgtggggtcatgttccacatgggaacagagaggcacaagggcttctaagtattgcacagtcttgaaaaaaaaaaaaaggagttgggaggagaagatcacatgatactgggaacgtctcacattatgagaaactaccaagaaacattcgaaaagaaaaccctctgtttctacagtagctttagtctgcagttcttggaatgactattccattgaagacatcttagtaacaggaagcttcgtttgagcaatcccatgtgcaaatattaataggaaaatatataaaataatgcatctcttgccatcacccccggcaattcaggaccgtattttggagaactgttttgtttgacactcggttaagctgtgagtttggcctgaagctccatctctgctgcctgcttgagcgcaacgtccaccaggagctgaaatccactaaaatcc

SEQ ID NO: 890 - DNA, 363 bp, Rattus norvegicus
  Genbank Accession No. AA818158
tttttttttttttttctgattaaaacaatacaacattctaagatgtcttttgtttattttattgtttatcttctaatagcccacagaagagactgaaaatagttgtgggctaatcttaaacatgaagtagagaataagcactaaacactaaaaaaaaaataaaataaaataaaacttttaccttacttattaaactaggaagaattttcctgaaacgcacctgttaaattagtctataatatattaatgaatggaggacatgtatttcctagtaaatattttaaacatgaagtatacgcttgggggaaaaaaaacttctcaggatatgaaatttttcaagtctcaatcccctgaacagactaa

SEQ ID NO: 891 - DNA, 105 bp, Rattus norvegicus
  Genbank Accession No. AI010584
gacggctatcaagtgcgttttattgaatccattgtggatagatgaatgttacacctgcgtgtcgggaggggcaaaggggcaacgagggatgcagctgcacatggt

SEQ ID NO: 892 - DNA, 592 bp, Rattus norvegicus
  Genbank Accession No. AI228624
agggacccaaaatacagagataatttattggtcacgcatattgtcccttgcatgtttatctgtatagcatgtgtgctgatcccagcagagacatgaaagagggcattgtttttaattggcaccatgtgggggcaccaagacatgaaccttctgtcctctagaagaacagctaacggaaatctttatagctgatccatcttgacaggtcctaaagataaaccttatttaatctgcaaagtgaaaaagttttgcaaggtcatgcccagagctaaaattttgacgctttcctttgcaaagctgaatggtgaaggtgtcaagaagaccagttctcagagagaagactttaatgaatatattttacaaacacactggagaatcaggcaatgcttcctgcattggatgcaatcctgggccacaagtctgcacactcctttgcaactggacctgtgatagcagaacctttcatctcgcctttattgtttactatgacccctgcattatcttcaaaataaaggaacaccccgtcttttcttcgatatgactttcgtagtcgaatcaccactgcaggatgtacctttttccttagttatgg

SEQ ID NO: 893 - DNA, 237 bp, Rattus norvegicus
  Genbank Accession No. AA963933
tttttttttttttttttattttttgtccaaaacatcgagactgcgattttaattatcatcatgtaacttgacgaatcactattatctactacagaaagatcaccccaaacagagccatatgccaagattttgtctatgcgcttcattttaggaaaacacatatctgatcacatgacaccttcacagagcatgatatgcccggagaagtacaagatggatctagacagtaaatcctgg

SEQ ID NO: 894 - DNA, 345 bp, Rattus norvegicus
  Genbank Accession No. AI233583
tttttagtggggggtttttttttcgtctttgataatatgatttattgtccattgacagagcaaacgcataaaaataaaaagaaaggctgacacagagcaatcaggcgcactcggcttgttgactttcaacaactctcatgtacgaatcgccggcggcgtggggcgtgggatgagggggttggggtgcattacaccagctacggctgtacacaggagcatccgtcacatgttcaccttcagcactttcccagtctgccgatctttctccacacagtatcagctgtcatagaactctgtgaaagtggttgctagctcataaatggaatcacacagagtgtggagaaa

SEQ ID NO: 895 - DNA, 638 bp, Rattus norvegicus
  Genbank Accession No. AA800245
gggacacatgagttctttattgagaaccatccctgggggtggaggccgagatgggtagcgcgatggtctctgcgcagatcctcagcatcccttggctcccgggcgtgcgctctggatcagagtcggatcagtgcaaaccttctggcccgtccagccgctcctcctccagccctgtgttgccctcttccccgtccaaagtcacctcgtcatcctcttcatccccagaggcgcccggctggaagtcgatggtccgcaacatttccgccacgtgctccacgatcacagagaattgctccatgctctcatagcctggctccggccgtccagccagctccaccttcgacattgccccgaccttgttgatcagctccttggcctgctggaggtagagagccatctgcggctcctccatggactggatggcggactccaccagcttagaggaggcctccaagtggtctccgtactggcggatgaggctacgcacgcgctgcagcttctcctcttgcacccgagccagcgcttgaagcaactcgcccttgcgctcctccaaaaccgcgcacagggtctcgaacttctggtttaacagttgtttctgtctgccgctgttgtcctcaatggtctggcacacctcctcc

SEQ ID NO: 896 - DNA, 532 bp, Rattus norvegicus
  Genbank Accession No. AI011480
cacctgcaaactgtagcaaaacatgatcagctttagccgcagacaggtgtcctccacatccttaaagaacttagccatgtacgaatagaagagctcttcagaaggaaaaattcaagaacgaatagaaccttccaatctgaattttccagaagcaatgtttcaaatgattttaatcattcatttcaagctagatgacagcaccttaaaagtggctgatctatttccccagtaacatttctcacataacaatgtgttaaagttacaaatactgatatgcacaaatagctaatttctaagaaaaatatgtacagtgctggtggggagactgtactgagcaggagtgccaaatcctgctggcatactcatagatgcagtgccaaaggttgccgctgttgctcctctggcattggtctgaaatggatttgtagatgacgctgcagacggaccagtagcagcaacaaatggattcgtagaaggcgtagctccaaatggagcaggcccacttgaagcaggctgtgtctgaggagaggca

SEQ ID NO: 897 - DNA, 511 bp, Rattus norvegicus
  Genbank Accession No. AI180251
agactttattcattttgatcaggggaaatgacaatctcaatgtcaacttgtcacctaattgtaagcttgaactcacaggtatctttctctggatactgtacctactaacaatgtgaaatgatctcccttctactttctggctgcaaattgaaacaaacaggtcttttttaatggccaacactggtaccaggccagaggaaaatcaggccaaggcatggtaacttgacagccttgctagcaagtacaaatatcatggaacaaagtcgtaggcatttaaaaaaaggtatcagtataaaaagcttacactggtctaagaccaggcactctaaacataccccccaaacccagaagcttttgtggaaccgtggagacctctaagcccaacatttcccgaaaaaacccaaagcctgtattactgttaaatccttaaagttttaaatgcaccacaagatacacacccctcgtgccgaattcttggcctcgagggccaaattccctatagtgagtcgta

SEQ ID NO: 898 - DNA, 549 bp, Rattus norvegicus
  Genbank Accession No. AI233147
  misc_feature (1)..(549): n = a or c or g or t
ggcagtttccaagtaattttattcagaattttgtgtttgtttcctgaatcaataaatactatacaaaacaatgtaaaaatggctaccattttctctcccctgctcccctcacctggggacaagtccctggacaacctcattcagggggttctccctgtagatttggtccagcaaatgaggccagccatgttttagccccttgactcacttttggagatttggctggggtaggaaagcctttaggaatgaggtgattaggttagggaaatgcattattgtttgggggggaaggagacagcgccctgggcanaaccctaccccaaagaaaagggtgtctaaaatgttcacggttccttctttttgcctcaaaaagtgacatttattcaaagagagagagagagaaaaaaaaaacaaaacaaaaaaacaaaaacaagatgtccatcccttggctcccttccctcccccctccagctgttcctgagccctgcccccaggactgaaccctgggctagggccaggtagcaggacagcccctcaaatgaggtcaac

SEQ ID NO: 899 - DNA, 504 bp, Rattus norvegicus
  Genbank Accession No. AI070068
  misc_feature (1)..(504): n = a or c or g or t
tttttttttttttttttaaggcttaaccagtttattggaatgtctctgtagtagaaatttttaaaaaatatgcaagcgatctgtcttgctcagcacaatactaaagtagatgtgccttagctgcgaagtcccgggctcgagtcccggctcccgcgtcgagggtcgccgccctccgctgagttacgcacagttcactgtccagcggggtgggggacgcctcgccccacccctgcggcggtgtccagaccgtctgctgctgcgtgcagaggctggctgcatgattgccaggccttggctctaaagtctctgtctcctccagcctgaggtcccctccttcctgtcttggcgaccacctgtggtgctggctcctggctccatagcccaaggggcgggcgggcgcacactcccctctcctcgtctcagtctcggtgactccgcccctcccggaaggtatcacgggtagggtagcttttgagggattgttctggggaatganggggcgct

SEQ ID NO: 900 - DNA, 495 bp, Rattus norvegicus
  Genbank Accession No. AI013773
aaacaaaaatatacattaaatctcagatttacagcatatagaaataatttatgatttgcattttaaattattaatattgcacccagtaagtctttgacacatttgcattgtcaacccttcccgccattcaaaaacaatgaaagcgaaacctgacaaaatttcacaagctaaattttctgtaaaaaaaaaagggaaaaacgtacaattctttttatatacatagtaaagttgtaaactttcagaaatttacctccaggagatagaagtacattctttcaatgcattctaaaagtacgatttaatttttcctgtcctgtgtatagaagacaaactacatatggtttcctctttggaattcacagactgctatgaacatttgcaaaggagaaaagtaacctgtgggcaccttctgtagaatagggagactgtttcgtgaaggaaataaaatgggggaggggataagttaccttttcaaggatattttcccctcgtgcc

SEQ ID NO: 901 - DNA, 660 bp, Rattus norvegicus
  Genbank Accession No. AI103388
aggatcagtccagaagtaaaactctttattttcactgtccaaacatcagtcaatatactgggaaagccagcggaaaccctcgccgtagccttgcctcttgagcacactgcacatgaacacttccatggggcgggcgttcagctccttcagagtcacattcccctttcctgtggtttgcccatagagcccaaatatttcacggagtttttcttcactgattgcatctgtcctgtcaattttgtttcccaagataaggattggcacgttggatattgtctcatcagtcattaaagcattaagttcaactttggattccatgagacgagaatgatctgcacagtccaccagaaaaactattccattaattgctgggaggtaatttttccaaacccgacgtgcttgctcgtgcccaccaagatcaaaagtggtgaaagtcattccagcaatcgtcagttcttctgaagtgggatggagtgttggtacgtgctggcctagtctgtcatctttcagcatgtgaagaagagtggttttgcccgcattgtccaaacctaagaatacaagttttccagatttcttgtagagtcctaggaactgaagcacactgctgaagccattgtagatccactcaaagatgaaagacattattgatgcttacaacgg

SEQ ID NO: 902 - DNA, 288 bp, Rattus norvegicus
  Genbank Accession No. AA957480
tttttttttttttttttacagtgagatccaagtttattggtggagctgcagtggagtcccccctctcccttgggaaaagctgaggacacagcaccaacacagggatggacagacagatcccatatggacacacaagtggagcagactcacaacgaccagcacagccacacaggcacagggacacacaggccacagcaccaaaggacgcaaatatacaacacacaaaaccacaagactagggcacacaaacaaagtgcaggctttggggcccctgcatagacaagagca

SEQ ID NO: 903 - DNA, 414 bp, Rattus norvegicus
  Genbank Accession No. AI045871
tttttttttttttttttgcttttaacctttaatagataaacaacaaagtgatctggtttaaatacatattgagcaatgtcgtatttagaacaaagagctgctcagaacggttagggaaaacagacatgtcaacaaaaagaagacatttaacatttcaggctgtgtgtgtcaaaatgtcttccgattattattcccctacgaagaagcttcaaaaaccagttagttggttagaacttcacatattaaatcatacacgactggtgaaagaggaagaatttcagagattacctaagaggaatgagttaaacagtgcaaatactgagctgcttcctggaaatctcaccatgtgctttcctttcccctacaagaaatactgtaaagttgtctccagttttagcctcgtgccgaattctt

SEQ ID NO: 904 - DNA, 451 bp, Rattus norvegicus
  Genbank Accession No. AI043849
tttttttttttttttttaaaggtcagaaaataggcttatgtttattcaaaagcttatcaccttgcacattactattttgtcttgttttaaacacacacaactcttttaagtgtggactttgcatccctgatatctagcaaaaatcatatctaatgacaaacacaagatttcaaggaaaattgatttgaagcatagacactggatctccaatctctaaaaaattgcttctattaacaaagattggggtgggaagtcagggagaggaccagaaaaaaagcagcttcaaattcagggaagcaaagtaaaatggagaggaacagaagtaactcaagtttactaatcctgaaacgtccaacaaagtgtcatcgtttagagtccagagcaactcatctggaattttaaataaataagcttaagtttattcacatcttctgcttcaagcatagcccta

SEQ ID NO: 905 - DNA, 530 bp, Rattus norvegicus
  Genbank Accession No. AI177761
gcgtaccatgcatgtttattaattccccacccctattataaaaatctcttaattttgttcttaaagacagagaagggagataactctgttgagtcaattgcatgctgaagaaatgaggatgctccttggtggcctacagagtggactggagcaaatgctcagaggggctggtaggttgattgtcgtctccgggtaacgcagaaggcaatgagcaccagggtgaggaggcccaggaggaccaggccaatgatgagaggcagcaagagagattggtcactggcgcaagagaagcatggcccgaagtgtcccttgtccggcaactgagcagcctgcagcctcagggagagcaggtccaggtgaattgctggagaaagaactatgcttgtatttccgcaacagaagctttggcccaggggagcttggagctcttgaagagatgaattctgcgctgagaatgtccactgtgctgcttgtgggaaggacacattgtattccactgccatgtagttaaggtagactgtcctcgtgcc

SEQ ID NO: 906 - DNA, 261 bp, Rattus norvegicus
  Genbank Accession No. AI179167
tcggtgctcgtgtaaggtttttcttttcccctcaaattttatttcaataaaaggagacttgggcgaggtggattccccatagccggattctccccctccccccgagggtggctaatgctatctggggatgtcttcacagggaagagagaactatgggtgggctcctgcctgaggtctccaccctcagcccagcggacatatcacaggcagcttaaaaaaaaatcctaaaaaaaccaaaacacacatttaaatcctcgtgcc

SEQ ID NO: 907 - DNA, 549 bp, Rattus norvegicus
  Genbank Accession No. AA892554
caacgtttgcagctgtgtggctttgcagcacagcaattcataaaccacactgtacagaatcaccagcaagactggaatgatgttatagaaggcaccatcatgcttattacattaccagagaacaaaatacaggaaagacagtttctactgtacacagtttaaagaaaggaaaggggaggagtgtgttgagcagccatccatccctgtactcaagagggcaggtagaaaactgacaaaacggagctactaaacctggtctagtatttaagaccacagcttttgaagttctcgtttttgttatttcgttcatagctaaaggacttccttctggaatatttgcagtcttgttaaggtttgtgtgcacacgctggtcacagcaagcagatagaatgccctcatcatttcacaaactattctctactggaaaagaagatcaactttttatttccctgttgcctcctggtgcagatttcaatgttaatgacttcagagtacccgacagtgcattctgatgaatacgtaacaagtttccgtttgtgttgggggttg

SEQ ID NO: 908 - DNA, 515 bp, Rattus norvegicus
  Genbank Accession No. AA893607
cgggtgaaaatcatggcaaactttattggcataaatcacaggagttgaaatgggaaaagccaggttagaggtttaaggtaaggaaaaaaaaaatcaaatgatcatatatccatgacccagagaatggccctccaggtaccccagtctcttcttggaggggcctggagcaggtaggtcactgtaaacagagcagtaaggcctgtgggtggaagtgtcggtcggtgtcgtctgcagcgcccaagctgaccttgagctgggctgctgctagcccagtcctgactgaggacccttgtctgggaccccatcacactgggcctctgctaggaagctgatgtactgtgtaggtccccagcctatggaaccttccagagtgccttttccaggacacatgaggttcaaaattccaggtccaaagggctgaacattcttggaccagttcttaatgaaaagtgttggcctgggcagtaagggaagggtttgagaatacagcagtttaaaaaacagtcctgggagct

SEQ ID NO: 909 - DNA, 422 bp, Rattus norvegicus
  Genbank Accession No. H33426
  misc_feature (1)..(422): n = a or c or g or t
aaagatttattcatgcagtttatgtatatgagtnctgtcttcatacacatcagaaggaatcagacctcatagatggttgtnagccactatggggttgttgggaattgaacttaggacctctggaagaactactgggtgctatcactcagacccaggtttttgggagagacagtgtcctgtgtagcctataactgattaggaatttgaatctcttctgcctccacctaccacatgctgggatgactgctaagagttgtagcttccagaaaggatgaacattaagacctttgtgcttctgtaacagaagttaaagaaccatgggaacattactttggtttcaacaggatggtgtttgttcaaggctgagagcctcaagtgagcaatttagcagagtctgtatacaaacagatttaccactgggg

SEQ ID NO: 910 - DNA, 544 bp, Rattus norvegicus
  Genbank Accession No. X17665
ctttccggtggcggcgcggcgcggtgaggagctcgtgttcatacttgtagctatgccgtccaagggtccgctgcagtccgttcaagtcttcggacgcaagaaaacagccacagctgtggcccactgcaaacgaggaaatgggctcatcaaggtgaatggacgtcccctggagatgatcgagccgcgcacgctgcagtacaagttactggagcctgttctgcttctgggcaaggagagatttgctggtgtggatatccgggtccgtgtgaagggtggtggtcatgtggcccaaatttatgctatccggcagtctatctcaaaagctctggtggcttattaccaaaaatatgtggatgaagcctctaagaaggagatcaaagatatcctcatccagtacgatcggaccctgcttgtagctgacccccgtcgctgcgaatccaagaagtttggcggtcccggtgcccgtgcccggtaccagaaatcctaccgataagccagtctcaaggatcagggtttacctttgtaataaacatcctgggacttt

SEQ ID NO: 911 - DNA, 499 bp, Rattus norvegicus
  Genbank Accession No. AI233801
aggatcagaatactttaataagatatcagtgtcaaaatacatttccttataaagttaagtccgtacagttataatgtcgtcagtaggaattggacaatgcagcaacggtcatgaagttgttacatggacaggaaagattactatgaaactcggaatagttctcagagtgttttagtaagaccgcaaagggaaacaaatgcctttaatgctgaggcaacaacacaggaaatcaaataccagcgtttgcacgtcagtaacccttcaagttccatcaccgtgtgcgtcaggccacaccgtgcgccgatgtgcgacgcgaacaacaccatgcctaggtaatttcaggtagattgactttcaaagttaatttttggtttgagcagtaagtcccttaggctcactgcactcttgcctgacgggcttcatgtgcactgaaaaagtttattgtaccctagtcaaacaacagcttatgttgattggtatcacaaacccaaaaggtgcc

SEQ ID NO: 912 - DNA, 654 bp, Rattus norvegicus
  Genbank Accession No. AA946503
aactggggacatgtgtttattcagcagaaagggggagcccgttggtggggcagcgttaacacaggtggatggggagagctgatcaaataagagggatcagatgcttggtggaatcatggctggtggggcagccaggtgattctctggcaacaggaaagatggagcggcagacagacaggtgggacctgaaccatcaggccactgcacatcccagtcagccacgctcaccgtctgttcagttgtcaatgcattggtcggtgggaacagagaaaacgatgttgttatccttgaggcccagagacttggcaaagctgacgaatcgctccttcagttcatcggacagccccttggttcttccgtacagggtgactttgaagtactgtttgttttcagaggtcttctggaaaaataccatggcaaactggtcgtagtcagtgtcggccacttgcacatcgtagctctgtatctgagggtagctgtgaatattccccagggtgaactggccaggcctggagcttggaacgaatgttctgatccagtagcgacagccctggcccctgacgaggatggaagtgacgttgtagctattgtcttcctgtaactcatagatggtgctgtacatggtaaagcggctttgtctttctttctggaccg

SEQ ID NO: 913 - DNA, 287 bp, Rattus norvegicus
  Genbank Accession No. AA955251
  misc_feature (1)..(287): n = a or c or g or t
ttttttttttttttcttgattgacatttttatttaggacaaaaagttaacagcagagagaagccagtgagaaaactgaatgtcggacccagtttggatggaatgcacatccggtgtatccagttaacgccaaggttgggagggagcagatggagactttagcagatgtggagagacatgtggccagttcactctggaggacggtgccttggtcaggggctgtgctcacccctggcttggtgatggactgggacccanaaagcaacatcccatttcttagttttgagg

SEQ ID NO: 914 - DNA, 448 bp, Rattus norvegicus
  Genbank Accession No. AA957007
tttttttttttttttttaatttaactgctgtttattggaaggagcagaggagacagagtgcgggcccctccagatcggatgggacaaggctggcaggaagcttacagagggtgggtcccttgagggaaagatggctcagcagcagcgagctccagctcagcatatgctcttgttaccccacttggccatcttgttgttgattggcatcttgaagcagcggtcagactgcaggaatgcagcaatcttctccaaagcctcaaaacggcacatgaaagccttcagatttgggaactcatccaggcacttgggctcaaacatacgattctggtccaagacgtcataagtgagaaaatccacgaaggtcagcttttctcctgcaaaccatgtgaatttccccaggaacaacgagaactgtttcagctgtgcaggcagttgttccaaatactga

SEQ ID NO: 915 - DNA, 587 bp, Rattus norvegicus
  Genbank Accession No. AI104907
tttttttttttttttttttttttttttttttattgatgttcttttttatttttaaaatcacacactgtatacacatacaaatccgtctaaaatttattcaccaaacccccagtttttcagcaattagttcttactcagcaccaaaaactccagtctgtggagacagacagacttctgcagtgtggttgagcattgtcaggtcctaggttaattccgagacttgccccctttgatccttttctcttcatggctctctagacacaggctgtcaagacttcagattcatgagccatgactaccacgaaactcaacagcctttggagaagaactcaaaataatgagatgactgaaatgagagacgctacatgactggtgagcactctccattccgaggacattggtatttttaataagtttctagactgtttggtcataatgccatgatcgcactaggttatttctagcctgagactctgtgactttgtcatacatctcaaagaaaaaagtgatcagtattgtgggaacactttaggacaagttagggaatcaagcggcagctgagaacctgtgaacacagactaatgagg

SEQ ID NO: 916 - DNA, 496 bp, Rattus norvegicus
  Genbank Accession No. AI070158
tttttttttttttttttccttggtttgtttctttttgttttaatttgttttacacagggtttttctgtatattcctggctatcttggactcactctgtagaccaggctggccttgaattcagagattcaactgtctctgccttccaagttttgggattaaaggattttcagcccttatgtaagtctaaaattagtccctggccagacatgcatgcacgcacacacatatacaagttctccagcatcacagctatgaccccggagtatgcacggagggctaagactacagtaatgctcatgggtactcagaagtaggagcccacttttaggactaagaaaagggttccagtttacctggaaccccaaggaaccctgctgggaaggactccaacactgtgggtaggaaagagtaaatgaatcattactttcaaagctttagttagtggtgttttgagaccttccaaatccctgtagcctcctcccaagggaaagcata

SEQ ID NO: 917 - DNA, 580 bp, Rattus norvegicus
  Genbank Accession No. AA850738
accaggcacagttatccaatacgcagaccaatacacatgacacggccaatccgcttattagcttctctgattaaacaaaatacatttcatagaaatgattataaaatgcatcgcagatagaatgttttatacttacagatcttatggtaccctaaatcattattaataaaaaccagccaacccatactgtaagtaaagttagcagaccaccacttacgctttattgtaggagaaagacatccaattaccatgctgaaatgggttttagagtccaacacagacatcctgcttcaaagctcccactgcacttacaaccccaggaacggggctttccttcccatattacatttctaggacagctttgggctgaaagattagttttggtttcagagcgaatctgatttagtatttcaatgtcacacctcaaagattcctgacgggaggttggggagaatcactccaattacgtactagtcacaggcgcaagacagcacaacacagatgggacatttaattcactttaccggacatgctcacccaaccgaaattgggaaaatttaaaggcacagatgaatagaaa

SEQ ID NO: 918 - DNA, 634 bp, Rattus norvegicus
  Genbank Accession No. AI228642
acttttccaaacactgtttacttcactaaaatctggagagaggcaatgaaaaggtacgccaacccctgggatgccaaactaggagtgtacattgacaacagcaacatacagggccaaggtgctgagggccagcaatcctgtcaccactgcccgggccagcagcgctgtccaactacccaaggagcagagatggacaaaggtctccatgacaaaggccttgtagacactaaggaacattaggagaagaacagcaggccggaaggtgtggtacaggtcatagcgtgttatcatccagacctgagctgatgcaacaatgtagtggaccagactgatgttggagtcaatgctcatctggatatatttccagtcaaattcaatgcctcgggctcccacccagagagggatgcagcgggacataatgagttcagcagtggcccagcccagggcagcaaccatgatcttgtactcccccttgcctgcattccgggacatgacaaggtttaggcctatcaggtctgccacatccacactggccttcatgaattccccaatgaagtcatagatgcccccttcccaggtggggaagaaagtggccaaaaacaacatcttacatagctgcacaaagaggtaggtg

SEQ ID NO: 919 - DNA, 321 bp, Rattus norvegicus
  Genbank Accession No. AI236473
atgctacgttcaaaagtatttttttttgagaatacaaaaagtaatccttggaaatgagaatatataacagaaaagagcacaataacttaagtgttaaacatctgtatgaaataacttgcaaagtttgacaactatgcacacatagaacatgcgggtgtttaaaaaacagaacaaacaaaaacaccacccgattctgtagaaccagcatcatttcaccagcgggagagcaccaagcaaggcaccattggaaagacaacacacttggaaagtctctataaataaagcaaatgctaatctggtcgaaaaatcggtgtctttggt

SEQ ID NO: 920 - DNA, 334 bp, Rattus norvegicus
  Genbank Accession No. AA875512
  misc_feature (1)..(334): n = a or c or g or t
tttttttttttttttttacattatttaaaattaattttattacacacactttgtgctctcaatgcccaatccaatccccatgggctcaaagggagtataagagacagaatggcttgctggtctactggaatggaaatttaatggtacttgtgggacatagcattggctacactcatcaccagcttctgccacgcagcctgcacctctggggtgaattccttggcaaaatgagtanaaaggacaatcaccagcatgttgcccaggagcttgaagttctgacgatccacatgaggcttgtcacagtgtagctcactcagattagcaaaggtctcct

SEQ ID NO: 921 - DNA, 386 bp, Rattus norvegicus
  Genbank Accession No. AI171916
acggggacttacgtatttttattgaaaatacaaagaaagaagtccaacaaagctaaagccattccacgtccccgtacactaagctcgcacgacttagcacatcaccttccgcatgcttacgtaacggcgttacgtgtgagtctacctggcactgtgcttagtagcacagacacatacttctacagtcgtcccaacagtgtcgtcatggcaacagtgtcgtcatggcaacagtgtcgtcatggcggcatacctcactacttcgtcagcacactttctttaacataaagatttttctccaatgcacacatacacactctcatgcagttaacattttttcatcattctttagtttaaaaaatacaagagctcacaaggcaaaggacata

SEQ ID NO: 922 - DNA, 502 bp, Rattus norvegicus
  Genbank Accession No. AI176209
gggacaattagggaaataagttaaaaacaaatttattattcaaattccagagggtgggaaatttgaggttgcaattctttcttcatctactgggccctattcataaaaacatcagtaactaagagcaggtaagaatcacaatttcagagtcaaactggtttagcaatgtctaatgcatatgagtaagccaattaggcaaatgtgacttggaagcacagaacttaacggttaatgctgcccagtgtcagtcacatgggccaagaacattgtggcttcctaagttagaaaacgccgtagaccacaattttcaatggaacacattaccttttgccaatcaccccccacccccaataaaagtccactttcattgttgagggagtaagaggaagaatgtgggggatgtggctgagaatggaagctacattagcgtttttgttatgataaactttgcattcaaaattggtaaaagcccgttagctgccaagagggaataaggagaaca

SEQ ID NO: 923 - DNA, 557 bp, Rattus norvegicus
  Genbank Accession No. AA946476
agataacagtgacgtgtttactctgaaatgctgagcggcaagcgagatagatttaagggaatttgagaagccaggaaatgttctttcaagggttaggtccgtgcaaacaccaagtattctgccactaagctacatccacaaccgtctaggggagttttatttaagaggcaaatgtggaataagccttgaacatgggatcgaattaatgatgaaattccatggtctcaaaaagctacatggaaggttctggaagccaaccctggtggtctccaaccctggtggaacccccagaccatttgtacggatctctgagacacactttgtgcaggggctcaaaggtgactcaaaatgcagctgctgaaagtctagctcaccagcagccagacggcagcaccaagcctggagcttggtgatgcaagcctcagaagactccggaggctttgtcatgtgtggctttagaagccaggcatctgttgtgtgtgggacacttgcccagatttgatatcacggctgtgctcaagggctcgatgaaattttgttggctgcgtagaacaaag

SEQ ID NO: 924 - DNA, 321 bp, Rattus norvegicus
  Genbank Accession No. AA818069
  misc_feature (1)..(321): n = a or c or g or t
cggacgcgacgccatctttatcctggatcttggacttcacgttctcgatggtgtcactgggctccacctccagggtgatggtcttgccggtcagggtcttcacgaagatctgcatgccgcccctcaggcggaggaccaggtgcagggttgactctttctggatgttgtagtcagagagggtgcggccatcttccagctgcttgccggcaaagatgagcctctgctggtcaggggggatgccctctttatcctggatcttggccttcacgttctcgatggtgtcactgggctccacctctanggtgatggtcttgccggtca

SEQ ID NO: 925 - DNA, 478 bp, Rattus norvegicus
  Genbank Accession No. AI102578
gaaatgttttatatcaagctatatatatatatctggattctgtcctgagtacatgcatacaaaatcaacactataaaaataattcacaatattaatgtcatcgacaagttaacatctacaagcatacaaaggctgtgtgcattgcttgccctggccagctcggtaaagcaagtacctgggaaaggggacagaggagagacttcagatcccagcctcgaaccatgaggaagcaagcctgggtcagggctgagcagggctttcatggctggagggaatgggataagtgaggctttgcccctggccctagggagctggatggggctactcaggccgttaaaaggcagactacagtgtaggaaggcaaaggtcgctctacccaagacaaataatcactggcaagaaatctctcacatgctcacacgtcaactccctttagtggggtctggaccccactggaccaacatctgtccaatcatgg

SEQ ID NO: 926 - DNA, 575 bp, Rattus norvegicus
  Genbank Accession No. AI176584
taaagaggagctgagccctccacattggggtgattttttttcccacatttcgttttttgtttttttcccacaaactggtttgctattgaatttttttttcaatccgtttcaccagcaaaaagtataagcattttttttttaaagtcgaaaacaaaaaagaagagagaacagagctatggtgcctgaacgcaacactacaaagagctaatagtaataatgtgctgtgaatattgctgtcgtaaaaaaacaaacaaacaaaacaaaagccaaaaacaaccggtaggcgtctcggaatctgaaggagtcttgtctgaactgtgctatccgtgtgacaggctatctgtgtgacaatgacggtcggagatggggactgaggctggtgactagggaccagagaagtggggtgaatggatgcggggtgacgagggatccccccctcccctctgaccctctaccttccttttccccatccagaaagacttagagaggaggtcagagcctgtgaagtggtgaaagtctatactccattaaaaaaacaccaagaaagtctgctcaaagaaataagaacggggaaa

SEQ ID NO: 927 - DNA, 594 bp, Rattus norvegicus
  Genbank Accession No. AI177099
ttagaagacagagttttattttcaaagctaaaagcagcctgggaattctctgcactgtaagatacagctttacatgtgtatcaatagagccaataaattactgtttctcttcaaggactactatgtaaatgtttgaatcggaaacattatgattgcccattgcaagctttgctattgtcatttggaaacactataaccacacattaaaaaaatatcaatatatgtatgactctcagaagacatatacatatacaaacataataatccatattcccggtatgtcacatatttgatataaacctctgaagcatgtttggataaggcaaaaatcagagctctccaaaagctgaaagtttaatttacttgccaaatatcccctattaacccgaacatcaatattttaaagtctctatgtaaaaagtatgctttcagactgcttaaatgctataacgcacacaacaattttcaaataatagaaccaatagttttgctatttgaagaatattaggtaaaagatactatgtgacacacaccacaagagtcaatgataaaaagctggcctctctcctacaatgagtgcaaaacgaccatcgg

SEQ ID NO: 928 - DNA, 409 bp, Rattus norvegicus
  Genbank Accession No. L37970
ccatgctcgtggcgctcctcccagtgctggggataaactttctcctgagagttgcccaagctcagtcagtgactcaacctgacgctcatgtcactgtctctgaagaaggctctctgcagctgagatgcaagtattccacacctggggcaccttccctgttctggtatgtccagtacccacagcacgggctgctgctgctcctcaagtactattcaggaaaccccatggttcaaggattgaatgactttaaggctgaattcaacaagagtgactcttccttccacctgcgggaagcctctgtgcactggagcgactcggctgtgtacttctgtgctctggtctccgggggacaggtgctgggccagctcactttcgggagtggaacaagactccaagtctatgcaaatgt

SEQ ID NO: 929 - DNA, 506 bp, Rattus norvegicus
  Genbank Accession No. AA800613
cacactcaagattttatttaaaaattccaaaaaaacccacaaaaatagacttgtacggtaacaatatattacttaatatattatagtatatacttaatacagtatcagttttaacattacaaaaagaaaaacggagtagacgacccaatatatataaatactataaaatcttattacaataaataaagtcgtcataaataaagggtccattggttggggcaggggcgtgggggaaaagggatttggcaatggctttggctatttgctttgggagggaaatttgagcaccaggattctcaggagaggctacaaccaccggacactgaacttcggggtctagtaaaaattaggatactattgtgggagccgggtcttcacagcacttaacattccaggagaccagagtttccgaggggctggtgcatacctgtaaccccagaacttggaaaaggctaaggcaggattatattgagttcaaagccagcctggggtaccctagtaatccc

SEQ ID NO: 930 - DNA, 410 bp, Rattus norvegicus
  Genbank Accession No. AI179612
acaaatcaaaaggctttatttcgtattaaaataaataaataacaaaaaactactcaggcttagccccgccttcctcccaagtccaggctgggaggagggatttcactgggaaggggagagggagtggccacatcttgctctctaaggccatcttgtcctggcttcccattatgttcatcaatatctgaaagtccccaagttttaggaggggaactttgggcttccacatcaaggcagagcctctgggctgcgttactccattcaggagttccatttccttcagtctctcggggaggtaggtgattttcagagaccgggggaggcgtcaacagagcatcagcctcgatctgggttgctcctgctactgtttctgccaaccaggcctctgagacctcgggccccctcaggcg

SEQ ID NO: 931 - DNA, 544 bp, Rattus norvegicus
  Genbank Accession No. AI012337
  misc_feature (1)..(544): n = a or c or g or t
gatggtgaaaaacaaccctgttcagacaaagataaaaatacaaaatcagatgtagcacaatataatagaaactggctgaaaacagtacacgctaacagacatgatacacaaactcagggagggaggagataggagagggcagaggccacggcctacaccaggagccgctcaatagactgctgaatggattggatctgctgctttagttgagagccttctttgatggttacagaacaggcgatgaccggcctggagactccacaggcccgtcctaaagcctgcttggagcgtacaaatacataggggacattcttgtcttcacacagcagagggaggtgcaggatgatctccaagggctcagcgtctgctgccatcacaatgaactcagagatgcctctgttgagggttttggtggcttcattggctcctttccgaagctgcttgtagttacacgactgctgaacaaggtccagcagcttcttggtgaggtgggcatctgcgaggggataggcctttgggttcacatcagcctncgcctcgtgcc

SEQ ID NO: 932 - DNA, 449 bp, Rattus norvegicus
  Genbank Accession No. AI234620
ggccgcttccattttttttttttttttttttttttttgagttagaatcaagccaccagatttttattttcatgccataaataaagttccctatcactcccattttcttacaaatacatgaaatacagagaagcagaaattcatttggtgaacaatcagcttttgtatatctaagtgccaatgagataatgaagacctgtgaggcactgaaagtaagactagcacaccatccagtaccaagctcttttcatttcagagctagcagacagttgttggtgcctgtctttctggcacatcctggctagttattctagcaccacgagccaggcattgtggattctggacacatgttctagtgtagagcccagtctgttcaatgagaagaatcactactgagcaagcactgctgatagttggatcccagtcaggaaaatggaatggcaagaagga

SEQ ID NO: 933 - DNA, 592 bp, Rattus norvegicus
  Genbank Accession No. AA894212
gcatgtgtaacactttattgggaaagatttatacattctgacctgtcagaggccaaggatgacactgggtggtaggttgtatggggagcccagaaatggctcagacagaagctactctaagagcatgttcccccagggcttttcacttgcacatttcagtttcttcttcaggatgtgtgagaccacggtctctgaaacactggtttgatgataaaagcaaagaggaaaacaagaaggacatctctcccctctcccagaacctggccctgaaattcctgccccaatactggggacccactgggagtctgtctaagatgccggatgaccactggtccctgcaagggcattttgggaagtgtggtgtttgaacacctgaggactgttgcagagataatagggccaagaatggacagtaataccctgatgctagcagagggaggcttgaaaaggtcaagatgcagggagaacccgggagaagggtaccccagctttaaataggaggcggaaggattagttgggaagaaggaatcctctccaggctcttagccaaacaagggattcttgctgggtaaaggaaaatacagcctggttc

SEQ ID NO: 934 - DNA, 572 bp, Rattus norvegicus
  Genbank Accession No. AI137286
  misc_feature (1)..(572): n = a or c or g or t
tttttttttttttttttgggtttatataaaggcttttggttttatttattattaacaaacataaactgcaagtagtaaaggtcactcgctacctggggcaggccccagggtctctggcttctcttgtttccgaccttcggggtgagggtttgggtgcactcggtctcaatgctgtctcggtggcttagctagggaaaggagcgcacactggcgtcacggatgattgctccatttggcatacatcaagtgagtgcaattaggtcttagtgtatttctaatttcaactgctcgacactctgtcattctacaaatgtcacctcctagctggggatggtaggtgtggccctctgcaagggctgttgaatgaaagcagacacaggaggatatagagaagtcagagtcatgtacaatgtgttattaatattagtgacccagattcatggcctcgaagcattccgattagggaagagcacgtcctcaagccccattcatttttcacctcaactccccacacactgngctgttattttccctcagcccagcacttgcatgctttcctttcncagcctcgt

SEQ ID NO: 935 - DNA, 496 bp, Rattus norvegicus
  Genbank Accession No. AA956555
tttgctttgttttgtttgaggcagagtgttacactgtagtctaggctagcttcacactcacaatgtagaccaggctggtttcacactcagagcaatcctcctgtcccagcctcatgaactctaggctcacaggtggcgccactatgtctgacctttttaaatgccgttccttgatatcactgtcccaccacggaacaaagtgatttccacgtacaccaaggctcaaatttctttgcacttaattctctgctcagcgaaggtagtctgtattgttatacaaatgagtttggacatgcatggtataatatgatgcatgcttctgtgtgaagacagaaatgacctttttgtacttatgggttaggttggcatttaagaaaccttgacatgacagccagctaaatggacaagagcccagtccgtgcacggatgaccacagctacatcttcacgctgtcctttgtttgctggcactctactgaacctgcagaagccatgtt

SEQ ID NO: 936 - DNA, 512 bp, Rattus norvegicus
  Genbank Accession No. AI639155
ttgtcttaacacttttttattgattcatttgtgtttacccatgtttcccctcatttaaaaaaaaaaatcagtgtttctaatttcttggattttcaactttaagttccacgttgacaaatctatttttatgtacacctttgattcttacattacaacagaagtcacatgtttaaaaatacccactccttaaaacatagtcattgtcaatattttgtttacagtacagatcctgaagacaaacacttgactatattaagatttattagtctgaaaacagaatgtaggatattttgtatataccgtcggtatatactgaattctggcagcaaagtgtttatgagaaaatttcaattttccctggtagtataatataaaggccaatctacttctcacttgttacaactatatttaactgaattatggtttaaaatcacaaagtgataaaatataaatacaaaatactaagaaaagtttaacatataaagagaaagtgtcttatgtattgtaatttt

SEQ ID NO: 937 - DNA, 3471 bp, Rattus norvegicus
  Genbank Accession No. AF016296
ggcacgaggaccggctgaggattttatggttcttaagcggacttaagagcgttgtttcggattgttaagattcccgtttgctgggttttcctccctcaatcgtgctctcccgcggctgcctggggactggctcggcgaaggaggatggagagggggctgccgttgctgtgcgccacgctcgcccttgccctcgccctggcgggcgctttccgcagcgataaatgtggcgggactataaaaattgaaaacccggggtaccttacatctcccggctaccctcattcttaccatccaagtgagaaatgtgaatggctaatccaagctccggagccctaccagagaatcatgatcaacttcaacccacatttcgatttggaggacagagactgcaagtatgactatgtggaagtgatcgatggagagaatgaaggtggccgcctgtgggggaagttctgtgggaagatcgcaccttcacctgtggtgtcttcagggccatttctcttcatcaaatttgtctctgactatgagacccacggggcaggattttccatccgctatgaaatcttcaagagagggcccgaatgttctcagaactatacagcacctactggagtgataaagtcccctgggttccctgaaaaataccccaacagcttggagtgcacctacatcatctttgcaccaaagatgtctgagataatcctagagtttgaaagttttgacctggagcaagactcaaatcctcccggaggagtgttctgtcgctatgaccggctggagatctgggatggattccctgaagttggccctcacattgggcgttactgtgggcagaaaactcctggccggatccgctcctcttcaggcattctatccatggtcttctacactgacagcgcaatagcaaaggaaggtttctcagccaactacagcgtgctgcagagcagcatctctgaagatttcaagtgtatggaggctctgggcatggaatctggagagatccattctgaccagatcactgcatcttcccagtatggtaccaactggtctgttgagcgctcccgcctgaactaccctgaaaacgggtggacaccaggagaggactcctacagggagtggatccaggtggacttgggcctcctgcgattcgttactgctgtggggacacagggtgccatttccaaggaaaccaagaagaaatattatgtcaagacttacagagtagacatcagctccaacggagaggactggatcaccctgaaggagggaaataaagccattatctttcagggaaacaccaatcccacggatgttgtctttggagttttccccaaaccactgataactcgatttgtccgaatcaaacctgcatcctgggaaactggaatatctatgagatttgaagtttatggctgcaagataacagattacccttgctctggaatgttgggcatggtgtctggacttatttcagactcccagattacagcatccaaccaaggagacaggaactggatgccagaaaacatccgcctggtgaccagtcgaaccggctgggccctgccaccctcaccccacccatacatcaatgaatggctccaagtggacctgggagatgagaagatagtaagaggtgtcatcattcaaggtgggaagcaccgagaaaacaaagtgttcatgaggaagttcaagatcgcctacagtaacaatggttctgactggaaaatgatcatggatgacagcaagcgcaaggctaagtcttttgaaggcaacaacaactatgacacacctgagctccgggcctttacacctctctccacaagattcatcaggatctaccccgagagagccacacatagtgggctcggactgaggatggagctactgggctgtgaagtagaagtgcctacagctggacccacgacacccaatgggaaccccgtggacgagtgtgacgatgaccaggccaactgccacagtggcacaggtgatgacttccagctcacaggaggcaccactgtcctggccacagagaagccaaccattatagacagcaccatccaatcagagttcccgacatacggttttaactgcgagtttggctggggctctcacaagacattctgccactgggaacatgacagccacgcgcagctcaggtggagggtgctgaccagcaagacggggcccattcaggaccacacaggagatggcaacttcatctattcccaagctgatgaaaatcagaaaggcaaagtagcccgcctggtgagccctgtggtctattcccagagttctgcccactgcatgaccttctggtatcacatgtccggctctcatgtgggtacactgagggtcaaactgcactaccagaagccagaggaatatgatcaactggtctggatggtggtcgggcaccaaggagaccactggaaggaagggcgtgtcttgctgcacaaatctctgaaactgtatcaggttatttttgaaggtgaaatcggaaaaggaaacctcggtgggattgctgtggatgatatcagtattaacaaccacattcctcaggaggactgtgcaaaaccaacagacctagataaaaagaacacagaaattaaaatagatgaaacagggagcaccccaggatatgaagaagggaaaggcgacaagaacatctccaggaagccaggcaatgtgcttaagaccctggaccccatcctgatcaccatcatagccatgagtgccctgggggtgctcctgggtgcagtctgtggagttgtgctgtactgtgcctgttggcacaatgggatgtcggaaaggaacctatctgccctggagaactataactttgaacttgtggatggtgtaaagttgaaaaaagataaactgaacccacagagtaattactcagaggcgtgaaggcacggagctggagggaacaagggaggagcgcggcaggagaacagtggaggcgcagggactctgttactctgctttcactgtaagctgggaagggcggggactctgttactccgctttcactgtaagctcggaagggcatccgcgatgccatgccaggcttttctcaggagcttcaatgagcatcacctacagacacaagcaggtgactgcggtaacaacaggaatcatgtacagcctgctttcttctcttggtttcgtttgggtaatcagaagccagttgagaccaagtgtgactgacttcatggttcatcctacttggccccctttttcctctctttctccttaccctgtggtggattcttctcggaaactgcaaaatccaagatgctggcactaggcgttgttcagtgggctctttcgatggacatgtgacctatagcccagtgcctagagcatattagcataaccacatttcaggggacaccaatgtccgcttttgcatcgctacgtgcagcgagcacaggaaaaagaaaaaaaaaaaaaaaaaaactcgag

SEQ ID NO: 938 - DNA, 3628 bp, Rattus norvegicus
  Genbank Accession No. Y07704
tggggatgctagtgcctactgcgctggctgctcggctgctgagcctgttccagcaacagctgggttccctctggagtggcctggccatgctgttctgctggctgagaatagcattggggtggccagatcctggaaagggacagccacgggtccggggtgagcccaaggagactcaggagacccacgaagatccaggcagtgctcagcccacaacccccgttagtgtcaactaccacttcacgcgtcagtgcaactacaaatgtggcttctgcttccacacggccaagacatccttcgtgctgcccctggaggaggccaagcgaggactgcttctgctcaaacaggctggtatggagaagatcaacttttcaggaggagaacccttcctacaggacaggggtgaatacttgggcaagctcgtgagattctgcaaggaggagctagccctgccctctgtgagcatagtgagcaatggcagccttatccgagagagatggttcaaggactatggagactatttggacattcttgctatctcctgtgacagctttgatgagcaggttaatgttctcattggtcgtggccaagggaaaaagaaccatgtggaaaaccttcaaaagctgcggaagtggtgcagggattacaaggtggctttcaagatcaattccgtcattaatcgcttcaacgtggacgaagatatgaatgagcacatcaaggcgctgagccctgtccgctggaaggttttccaatgcctcctgattgagggtgagaactcaggagaagatgccctgagggaagcagaaagatttcttataagcaatgaagaatttgaagcattcttacagcgtcacaaagatgtgtcctgcttggtgcctgaatctaaccagaagatgaaagactcctaccttatcctggatgaatatatgcgctttttgaactgtaccggtggccggaaggacccttccaggtccatcctggatgttggcgtggaggaagcgatcaaattcagtgggtttgatgagaagatgtttctgaagcgcggggggaagtatgtatggagtaaggctgacctgaagctagactggtgaggtgagattggacggagactctaaccagctacgaggagtccacgagcagccgctcgccaccacgcacatctggctgtctacggactgttgctactgagaatgcactctatgttctttctttcagtttgactgaactaagaaaggagtaaaaccattctgtgaacccttatacagccgataagggtcctccacaggggaaggagttcagttcacagaggaacaaggtccagcgatctcaaagaactcacattttatttgtattcgaatttttgtatggatcgttactgtgaatcccatgtttccttttccctttctgttcccccatgagaaactgggttattttctgctaactatgccagttttgtcaacaggaaggatcacaaaacacaccctgcgattactgctgactgttctaatgcttttctgctttggaatctcggactttttgctcagaaatatagaatcaagaagtgtgttatagagccgtacgtgagaaccttactcttttgcaaggagcatatggaaggaggtacttctgaggacggtgtgttcatggcctcagcctctgctgctgctgctgcttcaaggatggctgttctatatcgtaccaattccttcaaggttctggacaaagccaaggtacactttacctttcatggcatggccgtgaagatggcactgacagccgcaaccaccccagcactgaggctgcctgagtctgtcaggctaaaaggttgtcccacttttctgaaaagctacaagggctcttctgcacatccagcagaatcatgacaggatgggcatggaggactcttcaggagtatgaaatgtggctgctgctccttaccatatttctcatgaaactctgaaataagacctagtagtctaggtcaccatgagaaaataatttcttctctacatcaaataagcaaaagagagaacatgaactagcccaaatcttcttcctgtggaagcattgcatgagtttattcaacctagacagcctcactgcttggaaaataattccctggaaattaaataaataccatggaaaagaaattaaactcctctgcaatcccactgtggccactagagggcaccaggaagtcagacttcattgtctcagagacttttcttcagtctttttttagaatttggtgaattttaattctgttccttatctgttttgtctttgttttttgttttggtgcctattactaaaattaatactaaacattttccaaggaactggaattttggccatttacaaaaggtcttcattctttagtgaggtcactataattcaactaagacatactctgtctcattaaaaataggtcaggttttcctgtgttttctgtcttgtttggttgtgtgtgtgtgtttacctatttttgcttgaatatagatataactatgtatcccaggctagcctggaactcatgatacctctgccttaacctccccctcttaagtgcccaggaattacccaactcctgtacagagatttttaagagaagtttgagtcacattcccccctgcagattgtgatttttttttttaagttaagtcctgtgtacatagttcacatgggaaaccatgacatcccagaggacatgggcagacacccacttggtcacacgacagagggaagctgcatgtttctttccctaattaaagtagagcatgaagaaagtatgattggaaagtgagccatcatttacatgtacccccaaccccttgtgcatgcactggcggtgggagatctctgtgcttaaaatattgaaaagtcccctttccttaaagggaaaaattacgatattttactatcgtagtacaaatcaaacttggattagatcatacattggtttgctttttcagtgttaaatktgggtgttcattttgtaaagcatacgctccctgctggggaaacaaggagtgatctagttgacatttgttaagtgtgaccagcagataccttgtgtcccatgattgatttatgcagagcagtaatactgggaagggggatttacttaagaacatcgacgggtaggacatccaacactgatttcaaagttttggcttctttattataatgtgttcggcggtaaaaaaaagtcatgggttgttttctttgaagctgaaagtctcatggtgttatttacctaaattatctgaaaaatttaaaaggggcccaggtttcattctgcgttggagtttgggggtctaattgttgcataaataaacaggcaaccaatcatcagaggttgactcctcccatcaataattcagctcgtgttttacccttttgatggactgatgttgtttcataagctattagtagtccaagaacaatcatgcaggcctcatgtgaatgtgttcagatgaggtttgatgttcgggatacatgtgcatgtatctccctgtagaatgacactgtattttgaggcattgctctagtgtatggaaacgtgatctgtgtattaaaatgttttatgcatgacctcaaaaaaaaaaaaaaaaaaaaaaaaaaaaaaaga

SEQ ID NO: 939 - DNA, 484 bp, Rattus norvegicus
  Genbank Accession No. AA893980
aaaataactgcatcctttaatggcagtaatacaattactggattaagagaccacatgagaaggcaggtgaggtttctggaagacagatactgagtacaaaaggggcgggagagccatgcgacgatcattgtaaaaatacagtacgttatatacatatttgcaccatcgactttcaactcagaaatactatttacacgtttgttacaatcctggttagagaacaatctttctttacgagtgtggcctgacggcaagtggggattcaagcggatgtccttgttccatgagggccttcagttaactgttccggaggaaggctccagactccacctcacccacagatttcagccttaaaaattcatttaattttttctttagcaaaaggacagcttttttctaatatagaccaggctggctttgaacctgtgatcctcctgcccctcctcctgagtgccgggatgacaggcgcactaccaagcctggc

SEQ ID NO: 940 - DNA, 610 bp, Rattus norvegicus
  Genbank Accession No. AI101527
gtgtattccaaactttattaaacatatatatctgaaatatgtttacacggaggacaaacagatagatatttcaagtaacttatgggacagtcattatctgttaaaaatattctttcttccacacacacaatttttctttttacatctaaaagctggatgcaaacttgtgatgtaaactgacttcattgttaactgttgaagatgggagacacacgttcgcagctcagttaaacaacacaacaaaaagctgttccctcacacgcaaagatgccatgtctctcccagcagaactgcacactgtatgtttacgccacatcatttcttcttctttcctttccctttcttactcccctctccctgctgaagacttgggtcagcacctcctgacttctgagtccttgtttttagcttgggtatcatttctgctacgtacagcatcaccgacttacgtgatgggaactgtacaagacagaggctgccatcttcctgtttgagctgtacccgaactctgcctctatactgaacatcacgattccattctctggaatacattttgtttttctccagaaacgcattcagtccaactgctgaacatacatcctgaatctaa

SEQ ID NO: 941 - DNA, 427 bp, Rattus norvegicus
  Genbank Accession No. AI030247
tttttttttttttttttacaactttagaaaatattttattatgaaaagttgaaatccatatcgaagctgagaataacacgaggattgtgtacacccctcttccaggctcagtaactgccaacacatggctgtcggctttcatcttgacctccctattctccgggacaccttcagaaaaagacggtcagcttttgagaggggctgggaaaactgcatgcacacatctgcagcctcccctgcagccagactgccatgatgacccaggtctgctgtgaagtccactgatgccgacacacgttgctacatacacacacttcatttagtgtatgtacctaagtcggtcaaagcagtatcacctgggtcacaagtgcccacacccaggagaaagagacagccttttctactctttttttttttcctcgtgccg

SEQ ID NO: 942 - DNA, 492 bp, Rattus norvegicus
  Genbank Accession No. AA924036
tttttttttttttttttaatagacaaaaaaatcattttaattgtgtaaaattttacatagaaaatacatagaatgtaccaaaaggataactaaaatcttcaacatcaaaagtggacagaacaatttttctcatgttctttggagtcttgggtttttgagaaaaacaataattccaggaggtacaaggacaattcttccccaaacgataacccttaacacatcttacacaaaaaaaggagcccaggagaaactggaggattcacggtgtctaggttataaatatcaatttaaaagtcacccatatcatgtaactcaggagcctctgttccaacccagtgtgttttatgaaacaaagagacagggctaactaaaggaatcaaagaacccttctccaagcactgacaccaatctaactggacaccctactctgatcccatgtgtccttgtcacaaagatgattttaaaagtaagaaagctgcttgtcctgaaagg

SEQ ID NO: 943 - DNA, 597 bp, Rattus norvegicus
  Genbank Accession No. AI009614
aaaaaggaaatgtttattgttgtgttacaaggtgattataaactcctctaaaaaaagcaaagatggatttaaaatatcaatatacatattcatctaaaaagcaaaagagaaaaaaaaaaaccgaaaccctgcaaaatgcggggtcgccgtaattaaacatacacagagcttgtatactgcaagacaggtcacacaccaaggatccttcaaacacaaacgctcctccccttcttggttggtttcaggtttttgtgtgtgtggtttgggacttgatgaaggaggggtgtgcacacagaggtatttacagtgtccatagggacaggggtatcaggttccagtgggactgtgaggggccttctctaaggtgccttcctggcttacgtctgcatcttggagagagaaactgggctggcacctgttcgactgcttgctagagcattgccccgtccagaggggcggggctggaatgctgtcggccatggtagtgacaccctgtgatagagaaagccccttcctgtgcggagggggcacatgctgctttctcctcatgctttgccatggtctgcatagctttcctctcatgctacttcctgcata

SEQ ID NO: 944 - DNA, 612 bp, Rattus norvegicus
  Genbank Accession No. AA817841
  misc_feature (1)..(612): n = a or c or g or t
tttttttttttttttttggttttctgctcacatttattggggctaaagagactaaaacagttaattttcttcccaaagaattgggaaacgaaaacatataatacaacagtaatttaagtaagcacatgaccaaaacttcctggatcacgaaccaacaggagatgtgaatagcctgtagatatcaattccaacagctttacaaaatgtcattcatctaaggcatttctgtggttctcacggccacatgttcacatacataaaggcctctattcatggacagagagatacgttctttaggagcagtgggtgcaggaggcgaaagcagttacacgcttagttactgagtaattttaaagaggaaatttggcgttccaagaaacagttttgtacatccaaaaaaaaaaatcaatgataattttccacttggattattttgtgatgcagactacaagaaaatccatgctggattatttgctttccaaaggccactttcaaagtacagatttcgagtccagaacaaatacccacagcgagaacaaacagaacggctaagactctaacatttgcctccatgtggctttcctcctcnctcgattctctgacattttctga

SEQ ID NO: 945 - DNA, 429 bp, Rattus norvegicus
  Genbank Accession No. AA997330
tttttttttttttttttcagtgtagacatttttattggtgagaagagtgcaaaatagcaaaaaatccagaggagtgaggaaaggatggggtatgcctccttccggacgtgtgcccgtcctattaccaagcaagtggggagggagtggtcggtttaacagtgacacttttgaacccagcagcctccaaccatagtgcccggacagtaaggctcctgggaggcacgggggaagagagatgggtgacgcactgggaagtgtatgggtcgaatcctactctggttgtttggaaatcagtccgctgtataccttggccctcaggaaatcctcacagcttatggcaaggacacaggtttcaagagattgaactcccatccctccaaacacccaaggagctgtcttgagcctcagtttgcctcttcctaaagatca

SEQ ID NO: 946 - DNA, 483 bp, Rattus norvegicus
  Genbank Accession No. AI170693
gtaataaagacactgcttttatttagtttgatatgtttctatacagaatgcagaaaacacatcttaaaatcatatagaaggaaataaagacacgtcagtggttggtgaacacttgaatgtgagattggctctctgtctcagagtctgatggccatcggcagctcagggcttagggaggaggctgcctgcaaaggcattgttgctcttgttattctgttcactgccccactgcctccagttgctatgacaacaagccactctgggccagcctcctctctacatggcaatgcccaatggtggtgttgctaagagcaacaacagttatctggaaggctttccaaagccctcacctggaatactgggattgattgattgatttttgatgaggtcaccagaaataatttcatcaggtcagatccctgctcttgggttaagggggtacatatggagggggtgatcggtatggggtcatgttcttgggac

SEQ ID NO: 947 - DNA, 620 bp, Rattus norvegicus
  Genbank Accession No. AI234819
gaaggtggaaaacaatatattaatttattcccaagggaaaaaaaaaacagaaaacatccgcaaaaccaaactggacacagtagatacgggtactttccctgccagctcaaatgctgttctctttccaatagtatttacagtaaggaggtgaccgacaatgggcgtgtaaacttctccagaaaaatcgtctcattctccatgagcgatccagtgtaaaacattagtcttcaggtgctctcatccgaataacaaaggagaaagcggttttagatttcaccttgactaagtacttcttatatctcaaccctttcctacccgatacaaccctattttatttttcagtagaagaaacaagaaagtttacacgaagtaattccctttaaaggtatgtaacattcagcaggtacaattacagcacaagaatgaaactgtggtaagtgacgtcattaaagcaaatgggtttttcccctgttagattaaataaatatttctaaatgcgatagagcgagcaaagacaaatcacattttgaaaattatagttattcatttgtgtgtatgcgtatggggtgggaggagcggcagatgtccgagtgcaaggacaagtgtgtggaggttggaaa

SEQ ID NO: 948 - DNA, 587 bp, Rattus norvegicus
  Genbank Accession No. AI233766
cagaactagatgagagtttcattagactctaactaaaaacagagaggtgtgattactatttccagccagtttccccatcacgatagtcatataacaaaccaaggcaatgtcggtcttgagccagactcacaaagtcccccggccctggccctggcctcagtacagtgtctctgcattgctgcttcggggccgtttgatcttctcaatgtttttcaggatcatgtcatggagcgtgacatactgattcctcagctctgagatgatgaggcggaggctgatgtactctttctcatcgatctctgtgacagtgcggcgatagtcctccacatgggggtatttagctattttagaaaccaatttggctcttgtaatataatatctagaaatctggtccagataagacgcagcttcactctcgacagttcttagctctgcaactgtttcctcctgaatcgacaccccgaagttgttcccatcttctatcctgggaatcaagagctgaacccacattttgaccgtgttacatttctcgatcagcagccgaatctcaggttttactttctcaataatgtccacaagctggtggt

SEQ ID NO: 949 - DNA, 533 bp, Rattus norvegicus
  Genbank Accession No. AA893708
ccatagaaaacaattttaatgcaggtattacctcagatgcagtcagcagtcaaattagtttctcttctgaataaacaaatgaaactagagttgtttttatatttataaataaaaaatatacaaaacaaggaaaccagctaataaacataaggactgaacattagctggtgtcattaaagccgtacagtgagtatgaaatccaaaaggtaacctcacttagactttataaatggaatgtcccaggctgtgctccagataggctacttggtctctgcgggaacagaaggcccatcttgtggggtggcagcttctgccgctgcagagacaggctcggctgcagtagtaatgtcacacagagcagaggtatcttctgtgtgactggaggcagcctccgtctgattggagcagtcaggctgagaagttggggtctcttgactcaggctggcatccgttggactgggtgtgaggttagcttgaacagaccagtttcctcttctgcttccatttctgtttcttggctctgaacctcctca

SEQ ID NO: 950 - DNA, 498 bp, Rattus norvegicus
  Genbank Accession No. AI071578
tttttttttttttttttaccctaaagcttgcatatttattgaacaaatacgactaaaatagctaaaatacattgggtacttatggaaggaccacatgttacaaaagcctgcgttttcagcagcgtacaactgcaactctacgtaaatgccacaaatgcacaataccgtttccttgctctatttacatagctgatatatctaccctaacagaggtgggggtagggaggatgcacaagaaactcaggccagaggggaagcaagagagaatgagagggacagtgcatgcgtcattggtgtctaacagtcagaagcgcaaacagttcagaacaaggcctgccctgtcaaaggaagagctaaagacgttatataaaaattaaggtgggctttcagtccggctaacacaacaacattccgtgaagagacggcattgtcagattttatttttgtttatccatttcattgggagcaaggacaaaaatgtaaaatctataccttgct

SEQ ID NO: 951 - DNA, 483 bp, Rattus norvegicus
  Genbank Accession No. AA925267
tttttttttttttttatagctaaacaattttattggctttctgtgaaataaaaaacaggaaccgtcatggttaaaggcgaatcagtgtcaaccaaatgaaccagccacttggttcgagcagccgtggagaacacgagaggacattattgcttacgccccatgttcgtgcatgtgtctgttgtgttttggcaagaatacaatcggatggagctttggttaaggtcgactaggactactcattgaaaatccctgcatggcacctcctcaccagctcctccactccaacccggggaatcttcacactccattaaaaaaaggtcgtagaatttggaagaagaggtagcgaggtaaatgcggtgcgcaaagatgtgctcctggtcgtggaggataaagaggacgtcggcgcataggggattgtccagtaaacaggctgcgtcgctcgtcccggtggacggacactcggggactttgatgaccggggga

SEQ ID NO: 952 - DNA, 249 bp, Rattus norvegicus
  Genbank Accession No. AA998356
tttttttttttttttatgatacaaaaatagtttattacaaaagaaatctgacccaaacctaataatttacatcgtgatcaatgtcctcccaatcccctctgttcctccgggtccgtcggggtagaggatggcagaggaggggctgtcctttggttcctccactcaaagaatcgaatatctagtggattccacagagggaaccttcgtgcctgagattaaatggggcttagagtcctgggcaatgggcgc

SEQ ID NO: 953 - DNA, 1664 bp, Rattus norvegicus
  Genbank Accession No. X62528
agctagggccatgttttggggctcccgtctgcctttgagagtctttttcgggtcccttcctggccttcttaatacgtggcagagcgtctggaccagaagactacactgtgcaaccaccatgagtcttgacatccagtgtgagcagctgagtgatgcccggtggacagagctccttcccctgatccaacaataccaagtggtcaggctggatgactgtggcctcactgaagtgcggtgcaaagacatcaggtcagcgatccaggccaaccctgccctgacagagctcagcctacgcaccaatgaactgggtgatgctggtgtgggtctggtgctccagggcctgcagaatcccacttgtaagatccagaagctgagccttcagaactgcagcttgacggaagctggctgtggggtcctgcctgatgtgctgcgctctttgtctaccctgcgtgaactacatctcaatgacaaccctctgggggatgaaggcctgaagctgctctgtgaaggactccgggacccccagtgccgtcttgagaagcttcagttggaatactgtaacctcacagctaccagctgcgagcccctggcctcagtgctcagggtgaaacctgactttaaagagctagtattgagcaacaatgacttccatgaggctggtatccacactctgtgccagggcctgaaggattctgcctgtcaactggagtcactcaaactggagaactgtggtatcacatcagccaactgcaaggatctgtgtgatgttgtggcctccaaagcctcactgcaagaactggacttgggcagcaacaagctgggcaacacaggcattgcagcactgtgctcaggactgctgcttcccagctgcaggctgaggactctgtggctctgggactgtgatgtcactgcagaaggctgcaaggacctgtgccgtgtcctcagagccaagcagagcctgaaggaactcagcctagctggcaatgagctgaaggatgagggtgcccaactgctgtgtgagagcctgttagagcctggctgtcagctggagtcactgtgggtaaagacctgtagcctcacagctgcctcttgtccccacttctgctcggtgttgaccaaaaacagttctctgtttgagttgcaaatgagcagcaacccgctgggagactcgggagtcgtggagctttgcaaggccctgggctatccggacacagtgctgcgtgtgctttggctgggagactgtgatgtgacagacagtggctgcagcagccttgccactgtcctgctggccaaccgcagcttgagggaactggacctcagtaacaactgcatgggggacaacggtgtcctacaactgctggagagcctcaaacagcccagctgcatccttcagcagcttgtcctgtatgacatttactggacggatgaggtggaagaccagcttcgggccctggaggaggaaaggccatccctgaggatcatttcctgagatgtacacctctggacacaagatattaatccagccccagaggcagcccaccagatctctggctttggttgtcctagggttggactggcgataagcattgggatcttacttcagtagaaaactttaagacactttataactattaaaatactttgttggcaaaaaaaaaaaaaaa

SEQ ID NO: 954 - DNA, 127 bp, Rattus norvegicus
  Genbank Accession No. AA819657
tttttttttttttttctgatccaaacacgctgctttattcatacccggtcaaactggtcagtgcagaacctggggcctactgaagggcctctatcaatgccttgccggccatccacatggggcccat

SEQ ID NO: 955 - DNA, 588 bp, Rattus norvegicus
  Genbank Accession No. AA799729
cagctcatataaaagtctcttaagaatgcatttgagcacaatatataatagtaataatattataacatacattgtgagaaacttttgaaaacaatataacgtccacctggaacaacgcagtgttacagacgtaggaacccattggtcatgcacattttgtgccattttctttaactagttgtcacaatgctgaacttgtttgaagccatctcgctgacagagcggtaggtctggatggtctctagctggtctaggcaccagtctagttcctccagcgtctccattgctagtttctgatatgattcttctgcaaacaaacacacagacaggtagttaggctgcagcggctgcaggctggccatagccgagtctcctccgcctcggctgctcccggcgccactgacggtgcccccttgctccttcattgtttgcttgccgactccttgcttccaagctctttctggtgctctgcccgggagggggagtggctggtgccaagttttcaccccctcgccgggatgaggtgtcagtgatctaccaagaaacttcctcagaggaagaaggcgggacctcgtgccgaattcttgg

SEQ ID NO: 956 - DNA, 575 bp, Rattus norvegicus
  Genbank Accession No. AI105421
ctttatcatttattatttttatttggacaacatatatacatatgtacaaaatacctacggtcagaatcctcttttataatttcatttgatttacaaaaaacgggacagcaaaataacttaggtcactaatactgtacaaaaataaaactgattaaacagttgtaaagatcagtatcttacagtgttacagaccattcatccgctgtgaaagaacagcttatctactcaaagtgatgagtactgggctaaatctatctgcaaactgacaaactaattggtttctgtaattgtaactaccaaatataattctcaaaagaagcgtgatgtggagcttaaagccagggtgtcattccacaatggtgaagggctttcttcttccctaaccaaggagaggagatggcttaactctaaaactagtatattttccatgaatgacatctacttacagtattagataaaacggcttctttctttttgaacacctgcgatagtctttcaaaaaattcagttgggttaaaaaagtaaacaaaaattactatcctgcatttggatttttataagttaaatccatgggc

SEQ ID NO: 957 - DNA, 596 bp, Rattus norvegicus
  Genbank Accession No. AI104342
acgggttttttttggggggtttttttttaaacaggtaccaatttcagtctatttaaatatagtattaatacatgtaatatttcaatgctttgatatctgaaatttattgatttttgttcaatgacatgaaactacactgtgatgccatttacagaagcttgataaaatatactgaaaaatacttattataccacagtaagctttaaaaaaataaaattaagccattacagttaagttacaaaaaaggtgaaaacacaaaacatggctaacagtggtgatctaactgggtaaacaagacaaagaaaataatttcaacatttactcatttccttaacatggtagtctaaattaaattcctaagagtgggaggaggccagcttcatgggtagtttgctctgctgtgcaaactgaggtccacactacagtttcaagataaactacttagtcacatctgagcagggaactaaaggaactgagccatcatgatggagttaatttcaacatctccttacagctttcctttgtctttgtttttgagacaagctatcactatgtaactctggctacctgaattctagactaaactggccttatac

SEQ ID NO: 958 - DNA, 625 bp, Rattus norvegicus
  Genbank Accession No. AI102560
atgtttaacatagtgttatatttggaaaagcagatttaaaaaacacttgaaaatacaagataaggtaatggttacttacgtaagttttaaccttatattgcttggccatttttttttacatataaattattgcttcctactttgataaatacacagcacagtcatatacacagaggcagagaacatgaactatgagaaaaaaaaatcaaacactgtcaatggcagtctggtaagtcaacgaatgtttcatatttaccagctcttataatggtggaaaactacgaggtgtagtccctgagaagttaggtagatgcccggcctgtgggctttctatcttctaattgttatcccaagctgacagcatcatggcagtcctaagcaatgagacgtccaaaggcaagagtccttgcttctggtcattgatttcatcctggtgtttaataacagcgtaatacgaatacaaataaataggctatgcaaataaatattcctctgctaaaaatgcttacttagtatatacagctttgctttatacagtagtacatttcttccgactttttggcaattttcaaaatgggttttccctagagcaaaacgggcccactcagtaatgagtgggctgaaa

SEQ ID NO: 959 - DNA, 640 bp, Rattus norvegicus
  Genbank Accession No. X07314
gcagcagccagcctcagacaccatgtcaccaaagaaagccaagaagaggttagagggcggaagctccaacgtgttctccatgtttgagcagacccagatccaggagttcaaggaggccttcacaatcatggaccagaacagagacggcttcattgacaagaatgacctaagggacacgtttgctgccctcggacgagtgaacgtgaaaaacgaagagatcgatgagatgatcaaagaggctccaggtccaattaacttcactgtgttcctcaccatgtttggggagaaacttaaaggagctgacccggaggagaccattctcaacgccttcaaggtgtttgaccccgaaggcaaagggtcgctgaaggccgactatgtccgggagatgctgaccacgcaagcagagaggttctccaaagaagagatcgaccagatgttcgcagcttttccccctgacgtcaccggcaaccttgattataagaatttggttcacatcatcacccacggagaagagaaggactgagccctgaaccacagcctcgggtgacctatagcctgttctccatccccaggccctgctgtcccagcctgtgggtgttcaccatcccagggccctgtgcaaataaacaggaagtcttgg

SEQ ID NO: 960 - DNA, 519 bp, Rattus norvegicus
  Genbank Accession No. AI072424
tttttttttttttttttaaagagaagaactttattctttattaagataccatgctagaagttatgaagaatttttgttggaacacatttggaaaatagagtagctttagtttaataacttgcactgcagagaaaattgttaaagaaattcatatcaaagtccaagtattagttcaatgtcccgtatttgattccatgatcttcacagggaggtcttctgcaatagaatatgctcctatacagccgagatatttaaggttgcttgattttccttaccattactccactgcaagcttctggtgtaatcccacatagcaagtcagtcttcattgtaacaggtcaggaccggcctcgaccccttttccctgcccgcggcctctttgttgttgggcacctcctctcgcaccacgaacgcctcttgctgatccagggcctcctctctgtgaataaccggctctaccacggggaggagcagccccgcgacctctggatggagcagcaccccttgctcctctaccac

SEQ ID NO: 961 - DNA, 401 bp, Rattus norvegicus
  Genbank Accession No. AI138034
tttttttttttttttttgattgtattcaaatttttattctctcaacaaaaaaacttaagacaatgattttaaataataaaacatgatatattctagacacttaattgttttctttttaaaaagacagtttattataaatttggactcctacagttctggtgtggcgcctcgacatttacagtatttcttaccattttatcttcactccaaacttgctaaacaaagagttcctctccgcaccctcgaggcttcgctttaaggaaatacttcacgaccacacgaaacccacacacacagaacatttgtttttttttttttaaaaatatttacagaagtctgtccagccatttggattttgtttctttgcccatactgagatcaacaaaaaagccctcgtgccg

SEQ ID NO: 962 - DNA, 706 bp, Rattus norvegicus
  Genbank Accession No. AI103962
cattttcaagagtttactaagattcatcctcagatttacatgtgatatatttattgggttacccaaagaccaaagaatcccaagcagaatcaacagacagaatttaatatatgcacacggttgtatatataatgcagcatcacaccatgtagggcattgacttgttttatacattcagatcgtttgaaacacttcttaaggctacgaaacagaacatagaaaaataaacagcaatatattcaacacttacaaaagtggtatgataaagaatataaagtactattcctttcaacacttcaaaagatatgtatagatatgtatatgctttacaagtaacatcacaaagatcacatcttcacatgcttacaaggattattgtactcagtgtaaggctaggatcatttttcatacataaattttttctagctttgtaacaatgcaatttttttaaaccattcaagtaaattcaaccccagggctgctgcttcccagcattaagacatgcacccacccccttacaggattctccaaacttagaaaacaaagtcccaattatcagaagagccaagggccgacaataagtaagaaaattggctctttcaaattgatatgctcaagtgagccattgtgaagattttaaaaaagcaattagacataaagttagggagcaaaatacagtaaacagcaacagtatagcttcctcctc

SEQ ID NO: 963 - DNA, 832 bp, Rattus norvegicus
  Genbank Accession No. AF071204
cctttccttatgaagaagacacaaacttggattatcacttgcatttatcttcaactgctcctatttaatcctctcgtcaaaactcaggagatctgcaggaatcctgtgactgataatgtaaaagacattacaaaactggtggcgaatcttccaaatgactatatgataaccctcaactatgtcgccgggatggatgttttgcctagtcattgttggttacgagatatggtaacacacttatcagtcagcttgactactcttctggacaagttttcaaatatttctgaaggcttgagtaattattccatcatagacaaacttgggaaaatagtggatgacctcgtggcatgtatggaagaaaatgcacctaagaatgtaaaagaatcactgaagaagccagaaactagaaactttactcctgaagaattctttagtattttcaatagatccattgatgccttcaaggacttcatggtggcatctgacactagtgattgtgtgctctcttcaacattaggtcctgagaaagattccagagtcagtgtcacaaaaccatttatgttaccccctgttgcagccagttcccttaggaatgacagcagtagcagtaataggaaagccgcaaagtcccctgaagacccgggcctacaatggacagcaatggcactgccggctctcatttcgcttgtaattggctttgcttttggagccttatactggaagaagaaacagtcaagtcttacaagggcagttgaaaatatacagattaatgaagaggataatgagataagtatgttgcaacagaaagagagagaatttcaagaggtgtaat

SEQ ID NO: 964 - DNA, 381 bp, Rattus norvegicus
  Genbank Accession No. AA891666
aaacagaattgtccaggtttattcacaggcaggacgtcttcgggcctgctgctgtatatccctccacactcagtcaaggaaagacttctttggcctcctcagctgatatctcctgggagtagagatctgtgaagagagctggcagccagtagtgggcctcccctggtgcctgcagatccagccaggccagtccttccttcagcaggtgttccagcacttgccgtgctcgctccgtctcccatttaagactggctttgatttcactgacagtcacataaccgtttttctcggccagctgcagcacaacagtgtgatccatattgagctcagctggaacagactgaatgaggtaagttccctccacagggatgatgccaaatc

SEQ ID NO: 965 - DNA, 650 bp, Rattus norvegicus
  Genbank Accession No. AI179391
atggcagttgtttattgagtatatgctcattacagcatcactacacagattacatttctcatgtgatttttttttaattaaaaatatatccaaaagcaaaagagcagctgtacacagactttaaaaggtgaagaaagaaaagacagcatggacaggttcggcacattacacataagagtccaataccttaagcatttggaggtgaggggcaggacgcaatacatttgtgtaagactgtctcatggtttcctctgcatcatggagatgactgaactgcaaatgccgaagaacattaatgctgcactgaattcacactgcagtaatgacttttctatggaagctccttggaaagagtacattttgtcatagatcattttaaacatagttttatatcaatattcaaaggattttgtttacaaactctttgtgaacaaatggttacttttgttttaataccatggccaaataattaggcttcagtttttacatggggaaggtaaccttaccaaggggaagcacggagtcacaggaacacaagcaggttactaccttgactggcaacagtcagacaggacaacagagaaacaatcaatctgggcccgtaaaaatctggacaacgtgaaatcgaatgagggatgtaaagtcttgca

SEQ ID NO: 966 - DNA, 446 bp, Rattus norvegicus
  Genbank Accession No. AI069934
  misc_feature (1)..(446): n = a or c or g or t
tttttttttttttttttagtaggatagatgcgtttgtgttttgtggggtgatccatgaaacaggagtgaagatgcttgtttcttactctgtccactgagttatgtctctaggcttgtccaactcctttggctgtaccccccccacacacacacacattgctgactattttatttttcagaggaaatcagacgttatagcttagagaggcctgtaagcaatcctgcttttgtaagaaatggctgtactgatatcaaacggggatctttcatatccactttcttccaagtctaccagccatctcagattgttggtagacatggaacaaagtggctaaaactatagttgtgggaatgtgctttctgtactttctggtctattgtctaatgtgtangggctaagcgagggccagcttaaaagattctcattcgcctcgtgccgaattctt

SEQ ID NO: 967 - DNA, 337 bp, Rattus norvegicus
  Genbank Accession No. AI059971
tttttttttttttttttaaaggatctccatcttgtctttatttgcatgtggttacaattcataaatacacttgtactctttctcccgttcccaaactgtcctccacatgtggtaatgctactgaagcccccctgcccttctcactgtcctctctcccccaggagcaagggaggggtgctcctccatgcgacatcatgttcacccagggtctatcttggtccacgcagtacaagccctcaaggcctctgaaggttggggatgagcaccacaaagccttgcaaggtccccggatgtccttgaaagtgaccctgggcccagctccctcctctgccatgtt

SEQ ID NO: 968 - DNA, 681 bp, Rattus norvegicus
  Genbank Accession No. K02815
tcagcccaacaccctcatctgctttgtagacaacatctttcctcctgtgatcaatatcacatggttgagaaacagcaagccagtcacagaaggcgtttatgagaccagcttcctttccaaccctgaccattccttccacaagatggcttacctcaccttcatcccttccaacgacgacatttatgactgcaaggtggagcactggggcctggacgagccggttctaaaacactgggaacctgaggttccagcccccatgtcagagctgacagagactgtggtctgtgccctggggttgtctgtgggcctcgtgggcatcgtggtgggcaccatcttcatcattcaaggcctgcgatcagatggcccctccagacacccagggcccctttgagtcacaccctgggaaagaaggtgcgtggccctctacaggcaagatgtagtgtgaggggtgacctggcacagtgtgttttctgccccaattcatcgtgttctttctcttctcctggtgtctcccatcttgctcttcccttggcccccaggctgtccacctcatggctctcacgcccttggaattctcccctgacctgagtttcatttttggcatcttccaagtcgaatctactatagattccgagaccctgattgatgctccaccaaaccaataaacctctcataagttgg

SEQ ID NO: 969 - DNA, 149 bp, Rattus norvegicus
  Genbank Accession No. AI009675
cctactcaggctttattaaaaaaccaaaaggtttagggccaagggagggaaaaagggcctggtcaaaaggcaaccccggcaggaggcggctaaacggtccttggaggtcaccccagggctcacaaaggcaaggaatttgcccaaaaagg

SEQ ID NO: 970 - DNA, 284 bp, Rattus norvegicus
  Genbank Accession No. AI176989
aaactatttttttttacacatggaattacacacaatacaaactgcctgtattacaagttgaaatctttacattcgtgggttcaggacagcaatgcaggtgacatcagcatttcacgcagtgactccattcattgggctgaacacaaagccaagaagtaattatttacctacattactttctagtctcttaattagaaggaggaggagtcacgagatcatggcgtttatatatatatatacattgtccttcctctgttatatgtcagaatgataaacaatgtcag

SEQ ID NO: 971 - DNA, 395 bp, Rattus norvegicus
  Genbank Accession No. AI175875
atacacagcaaagcttacaggtttattagcggtctgtgtggcaacttctctttcaacgtttcagtggcagttctggcaacaaattcataaaaagcttaatttttatacaaatagttttattacaaatttgaattcttaagaaataacacatttaaagaaattacacagaaggccttagtagtcttaaaaactttttttttaaaaagggggtggggtaagggggacttttagtgtaacgccacttcaagcatagtgatcttcccctcctgcgcctgacctgtcggctccctgcaagatgaaaggccttggctgtcatactggaagtcagtcattcagtctgcggatagtgtggcaaaccctgaaaatactccgcgcaaagcggtaagcaggaagcg

SEQ ID NO: 972 - DNA, 416 bp, Rattus norvegicus
  Genbank Accession No. AI176479
aggagggatgcagctgcagatggtggagcacgtcaggatcagaaaccagaatcctctatcaagtctggagacgaggagcattaagagcaatgatgacgacagtaacaatagtgataatgaccatgaggatgctgaggaccagggagctgatgttcaggcataggcaatgaagcccaggcagcagaagttcatgaagagcgtattgaacagggaccagaccacatggtcaggcacagagacctctctgggcatgttgatcacggtagttctgacagaagccgatccgtggggtgcccccagttcagacacctcatattcttccttgattctttcgtagtttgggggttgtcccccagtggcagcgttcacgaaggcttgagaagtgtggttcatggtaccgagcaaaagcagcagcg

SEQ ID NO: 973 - DNA, 202 bp, Rattus norvegicus
  Genbank Accession No. U90261
tagtaacggccgccagtgtgctggaattcggcttgtgaagcactacaagatccggctccgattgcagatggaggtgaatgacataaagaaagctctccaatcaaaatgaatacttgatcattgaaacgccacattattcaccccgagtgcaagactcagatattctgccccaatcaaaatcatcttgtgccaaaaaaaaaaa

SEQ ID NO: 974 - DNA, 531 bp, Rattus norvegicus
  Genbank Accession No. AI102812
acacttttaaatatacctttatttctcaaactcaaagcttttattccatcaagttctaatacatatgcactgagaagaaatctcatctgtgtcacataaggaggtgagtgaccggtaccaagaaggaaccccgtatctctaggcactgccaaggaatagttcaagcctatgcagatacagaagagaaagcttccaatttagtccaaaggaaattttacttttcatccatattaatgtggaaatagatgcttcaggaaatttaagttttcacaaatacacacacccacaggccaggtagctggattctcttttgtaaagaccacagatcatgttaattagttctaccctcctcagtggatggtcaactcaccttcctatataaacacacatgagaatttgcaccaaatctcaacagccaggcaaaactctagaactcaaaaattcttgaagcttatactttaaaagtatttttttaaagtgacaggtaaacaaggaggcacttgaattcaaaaaaccaaaatcaataaaagc

SEQ ID NO: 975 - DNA, 484 bp, Rattus norvegicus
  Genbank Accession No. AI101921
  misc_feature (1)..(484): n = a or c or g or t
atttgatcattttaatatgccagaccaatttacagaagaggacggagcacacggaaacacctgtatttgcagcacggagggcagatgtccgcagccctgggcatgcatgtatctcctgtggaatcaggcaaatcacgaatgcataaataccacagcacagccagacttgggggtggggtggggtcacaggccacaggggaccatgcttcaaaggcagtcagaggcattaaatacaggggctaaacgttagagtccatctcaccgtacacataactcatacattaaaagtaaggagaccacggtatgtacgtgcaagcagctttggtcagagaaaatgaacaagggaggtggagccatgcacaggaagggcttgcctgtctactctccatcttcttcatccccacaaagtcacctgggatcatagaatgaatcanctggtctcggtaggatactgaaaagtcgtgtctggtgtccttaagggcct

SEQ ID NO: 976 - DNA, 187 bp, Rattus norvegicus
  Genbank Accession No. U75405
  misc_feature (1)..(178): n = a or c or g or t
aatctgttccctcccacccagcccacttncccccaaccctggaaacagaccaacaacccaaactcaatttccccaaaagcnnaaaattgggagacaattttacatggactttggaaaacatttttttcctttgcattcatctctcaaacttagtttttatctttgaccaactgaacgtgnccaaaaa

SEQ ID NO: 977 - DNA, 502 bp, Rattus norvegicus
  Genbank Accession No. AI102248
ggtgcataagatttgtttttgtttttttttaatatataaaagattttttttcttaaaaaaaaaacaaacaaaaaacaaaaaagtggtgctctttagaaacacttgcaggaagatcaagtagtccagctacagctcgcaccttcaccttcctcctttcgtggggaccaggagctcccagcctgaccccctctccaccattctgtgggcaatgggcactgcccatgctgccactggccgatgggacagcaaacagctgaccctgcttggaactgttggtggccagggccccctctggatgagggacatagacaactgcttggtggctgaagcagaaatccctctgccaggtggatgaggtagtgttctgggatatggccgcctctcccaacatgtgccaagccgcctgaaacagagtgagcgggcaggcacggctgggctgtcctggttggcagggaaagtcttatcagggactggcagcgatcgatagtcaaggccttcatcc

SEQ ID NO: 978 - DNA, 751 bp, Rattus norvegicus
  Genbank Accession No. AI009820
  misc_feature (1)..(751): n = a or c or g or t
atttgcctttcttttttattttaaccatttaaatttacttaggaaaagtaagattatttaaggaagcagcacccagttttagagtaatttagcacatttatatgtgaaaaatacaaaattactcaatacatctttaatacacaaatacatatacaaacattttattctaataatattctttatcacttcaatttaaaccattccattatgaaaatttcttaattgaagagagaatattcctttaaaactctaaatgaaacagagctttctcaactaatttatagccacacagcctttagaatacatgattttccagttcacaagtcttccctttaaaactgttacggcttgtcatggtttttaagatagaaggccccagacagcagggaggaccccagcgtgcagtgctcagagcaggtcttctcaggtgcccacccaccctctaagtgccaccaacctcgcatgagcacacttgccacactaacatttcttctgagtgctcacttggccatctaccaaactcaaaccagagcctgcaccactgcaggcgtgcaggctggcacccgccgtcagaaatgctcatctcacgtaggtgagctcccggacactgggaagtatgttaaacagggtccccaaaggaatcccgttccttgaatggtccacctattccttaactgaacggacacgtaaggcangctggtcctggacagcaactggactgcacgcactacagggaacgcccttcaccctg

SEQ ID NO: 979 - DNA, 544 bp, Rattus norvegicus
  Genbank Accession No. AI171091
gaacagcatgttttccgtttatttctgtgctcgcccttgcagtacatcaaagctcagtgaactaccgctaactgagaagtctcccgacagtcacagtgtgtgagagaagcaggctgtgtgaccctctgtggcagaagacacaccgggcgggcagtctgtctgctctgctcctggacgtgaagtaactagcagctgggctggggtaggcatggccgtgtcctgcttcagtctgagtccatggcaaacagttggatgtcctgtgggttccagtacaggccgactgccgagttgtagaccagagaccagacgtatgggatgaagaactcctcaggctgctcttcctgcacgtatttgaatttcagttctggaaatttctttagtctgtctttgggtagtgccacaaccccttgtttaatgatttccaagacccgttccactgacagctcagctccagattgtagcagtcttgagctaaagaaggaaattaccaggtcaatgttctgcattatgtcttggaatgaggggtgagtccggaattgctcaa

SEQ ID NO: 980 - DNA, 663 bp, Rattus norvegicus
  Genbank Accession No. AI230762
tgttttttttttttttttttttttattttatttatttatttatttttttttttttttggtccacacagggaatttcacattatctggcagcgcaggggcccctgtgggtcacatggtcacgtggggcattttcagagacccagggacctagcacagctaattgggcttgctcagggatgcagggaaaactgagaccttcatagaccagagggacgagggagggctggctgcaggtactggggtttgcctcagtttccccactgggcacaggagggtgaagtctgagggtgttgggaaagcaaatttaatccctcggaatgcccgcagtatattaaagcctggtgaacccgatacctttgggagcaaacaaagcacaaaattccttctcttctttcattgaaactgcctgtaggggttggggatttagctcagtggtagagcacttgcctagcaagcgcaaggccctgggttcagtccccagctccgaaaaagaaaaaaaataaaaaaaaaaagaaactgcctgtaatttccttggttcacaaaccacaaaaaccatgttaaagagaggaaaaaaccgaaagctctttgggccggcaccttccaccggccctcccactaggaaatgcactgcctcgctttcccaccaaggaaacccatgttccc

SEQ ID NO: 981 - DNA, 462 bp, Rattus norvegicus
  Genbank Accession No. AA875207
tttttttttttttttttcaattttaactctttatttgaaacaattccagagacaagttagttgtgacaacagtttctcactacaacacaagggtaggcatggctcactgaaggaacaggccaggcacctcagtacaatatatacattttaacagtggctaaactgatgacagttataaaaacaccaaaaagaaggctagggaacagcaaagccaacagggaaagaactgggtgctccctctgccagacactaacttttctgggcccacaaaggtaagatggggaagagaagacgtaggcagtaggacaggaccctggcccacagctcctcacctatcttttgaccacaaaccccatcctggatggcctaagagcctgaagttctcaggatccacatgcagcttgtcacagtggagttcactgaggctggcaaaggtgcccttgaggttgtccaagtgtttca

SEQ ID NO: 982 - DNA, 409 bp, Rattus norvegicus
  Genbank Accession No. AA859966
tttttttttttttttttcaactttattccagtaatttaagagaagattaaaataatagataatatgaaacagatgaagataaccgagctggtacaggtccaggccagcctagtataaagttaaggaggcatggagaatggtgaggcaggggagtggagatctctgttgcaatggcggaaagcagcttggagtatggttgatggtactgtctccttctacacgtgtgttcaatgtgttaacaaatgggaaacggaatcctgcctcattctaaaccagatggtaagagaaatatggcagaacgaggttgtggtatccaggcggctcgggcctgctttgaacactctaattttttcaaagtaaacgcttcgggccccgcgggacactcagctaagagcatcgagggggcgcc

SEQ ID NO: 983 - DNA, 675 bp, Rattus norvegicus
  Genbank Accession No. AA848315
  misc_feature (1)..(675): n = a or c or g or t
tgaaaaattcaaggcatatactggatctgttttcagaagagccgtttctcatacgaatggaggccgtgaacgccaccttccacctgagctgaggacgttctcttctcaaatttaagttcccccgagtacatcatggctctgacttgggttaagctcttggcaccaatgtcctgacaggaatgctggatgccagcaatcaaataagggacaaacttgtggatagaccctttgtcctgcactgcccctgaaactccttgggccactttgatcttgtcagcttcactgaaatatcggttctggctgctgaggtgtttgtccatggcatcaagagagcccataccacgatacttcttcagccggatcccatcggagaagaagtactcaccaggggcctcagtggtggcagccaagagggagcccatcatgactgtagaggccccaagagccaaagctttggcaatatgacccacattctggattcctccatcagcaataacagggacaccgaagcgacgggcatactcagagaccttgtatactgctgttgcttggggtcgcccacaggccaacacttcctgngtgatgcagatggaaccacttcccatgccgactcgcagagcgtccacacctgcgtcgatgaggttcttggcttgagcagcagtgactacattgcct

SEQ ID NO: 984 - DNA, 583 bp, Rattus norvegicus
  Genbank Accession No. AA944355
cagaacattttactggcaacactgactgtatcaaacagacattcctgggaatggtggattctcttcctatccccagagaagcataacaggaaacagacacagaacagaggggggtactgtcttaccacgggatcagcacagcctcatgggggtgaatgcctgcgccgggggagaggtgcaaggtgcccttgactgtactccccaggggttggtctgttacgcaataggtatttacaggagggttagacaaaatagttacctactaaaggtatccaaaagcggcctgagaaagtctggttaaaatgcataaccttgtattgctactaatgggagtagtcagttttatatcttttaaaaataataaaaagattctgttaaaaaatatattttttccagaaagatgttgatttgaactctaaaaagcagtgtggagtcgtcatttttcccttttggatgaagagcctcttctccatgttcgctccctttctggcttcaggtctatcctgtcccctctgtgaagccaggccgtgcagctggctctccccactggaagtccggcctggagcaggcacagaacacacta

SEQ ID NO: 985 - DNA, 513 bp, Rattus norvegicus
  Genbank Accession No. AI111695
tttttttttttttttttgccatataaattagtcagacattttattatagagtatatatatttatatcaaaagcacaaaaagacttttattctgggaaaactaggaagattgtgacattacaggagcatgattcaacaattccagtccatgtccacagtattaggtgccccatcagctgaaaaggacatccggggcagaggtcacagctctgagcgcccaaggctgcttagcatgatttccttaccaaactgagacctgcattcccaaacccaggtacccactttccagatatttgctacaaactgaagtgggcactgagccaaagattacacttgaaaataaccaaagctagtgctcctgtatgctggaagattaatcctcaaataataaggatatcataattggcactgtcatctaattctaaataaaagaatcatcagacatcctggaggatctgcaatgaattacacaggaagaagttaaaatcagaagcatcctctagtaaccaagcta

SEQ ID NO: 986 - DNA, 452 bp, Rattus norvegicus
  Genbank Accession No. AI237724
aatgatccagccatttaataggaactcacgaaggcaaaagttccagggctgcccacctcacccctccactaaatccagatctacattggccagaggccatctgtgcagccagggagaccagacccagctggaaggtgcttcaagagggaagggtatggttaaaagaaaatggggacagggtccccaaagcaaagtctttacaaaagggggttctcctccccacaaaaaagtgtcacataagctcaaaataaaatataaagtaaaaatgctgcattagaaaagtttgcaatgttaagcctttacaataggagactggccctcaagtgtcaaacatccagtataagtccatggaagtgcagcctatacctaaaatctatgtaagtgttgcattgaaaaagtaaaaaattcaagatggcctgtatgtagtgctttggggcccatgtggaggcaaa

SEQ ID NO: 987 - DNA, 454 bp, Rattus norvegicus
  Genbank Accession No. AI639425
ttgagttctttagactttaccaaatgtattttccatttgttagtttttaaagtagcttcaactgatgttgcacacaccatagctctgtacacttatgcagttagcctgtctcagaaagcgaataaaccgcaggtaacatctcccccagaactcctcgggaaacataattaggctgtacaaacacatcacaaattcaacagcacacggtgcacccgaaaccttttctatgaacctcaaaagttctttggacgtaatcactgaacattggtgtcgagcaaagatcagatttcgagcctccaattttgtgctgtgttgtgtcagcgacaagagcgccatccaagtcctttaagcaacgaagacatgcgcagaaccagttcagaaatcgtcaaatttgacgacaaaacagaaggatggctgcctactcccttcctcagcacgaaccctgttacgttct

SEQ ID NO: 988 - DNA, 550 bp, Rattus norvegicus
  Genbank Accession No. AI176970
gattttcaatgttatcttttattattttacaatatatttcaaaaactgccattatagttgccttcggttctctgagagtcctagaagaacacctagatagacacaaatatcagtccgaaattatcaactgacctggaccatcactaccaaaagggctatagtttttaaataaatgtgtgacaatgcaaaataaaataaaaacctgttaaacacagagtaaactttgctttaatggatatagaaaggaggtgatttgttttgttttcaacacatctggttctggcagcaaataataatataggttagcaatgtgccctgaaaatttctgctttctgcttgtacttatcacttgaatcagaggccagacatgcggaaaatgctctaaatcctttaacaccctccttccagaaagccacaacgttaatgaacataatggtctcacggcccatagtatgtacgattatttttccccagtaacaccggatggcttcaatgatctctaaaagagaaacaaagatgcaagggaaccttccagggtccaacttcactt

SEQ ID NO: 989 - DNA, 481 bp, Rattus norvegicus
  Genbank Accession No. AA799467
aaaatcatgattgtatttatataagtcgaatgcagagcaatttgccacagttcatacacaggtgtcagaatgaggtatataaaacatacagagaaatactttcataggaaagtaggaagttgttcagttctctcccacagtcagcaccaccgtgggaaccctgaggtccaggccccctcaacaaatggctctagagagcagcctggtgaggcctgctctcagtgtcaggagtagaggggctcctggtggggacactgccaaggccaggagactgggcgctctcggcaggacactcagaagctgcttttccctctctggaaaaccctttgggtccttcccagtgtttcagtgattgttttgtaccagttacacccttaaccttgtggaaggagctgtcccaagccttagggctgcctgcaagccaggttggactacaaagccagccccacccaccgtgcctttgttaccagcctctggctta

SEQ ID NO: 990 - DNA, 375 bp, Rattus norvegicus
  Genbank Accession No. AA851620
cataaaccaaatactttattatttgagaaagaggaggccaaattacaaaaccttcatacttaagaccacgcctaagacttctgaggacttccatgactgttagattcaaccatgtaaaaccgtcatcttagctgacaaaactcgggctaaacttggcaatttcatgtggctcgactgcgtataaactgactgaggattaagcttttgactcgagtatgttcctagtcccatgtctgtttatattacacacagatgtcccggcgacaaacaggtccctgtgctaaaccgcaaagcatttctctctgggcatgcaggccaaggcaacccaggactggcacagcaggtcccagctggtcctgcatcccctgtgtggtc

SEQ ID NO: 991 - DNA, 853 bp, Rattus norvegicus
  Genbank Accession No. AB020504
ggccacgcgtcgactagtacggggggggggggggaatgaggcggaccatctgaccccgctcgctcgctccacgcgctggcacgggagcgacagccaactgcagagcgaattcctctcacgccagtcactcagagcaatgaaactgtaacagttgttttcccaaatactgtacgatggtacgactgaccagcaacttccttttgttttgtattatatatatctttaaaatatcttgtcagttttactatgtatgttcatccattcaccaaagccctcaaaaagaagtttctccacagaacaggcacctcaggctctgtcccaaggaatgtgttttaatttttgcccggataaaagaaaataagctttgcacacactctcgattctttatttgcaggcaaacttcactctttattatctgaaacttttccattctcagcctcttagaggcacagatggctcaagtttcagtggcaaaaaagtctttttttttttttctttctgtaaccaaactagagcaaatttggaattcagtctgggactaaaacgtcacagcagaaaaaaaatgaaaaaaaaataatttgctttttctttctttcatttagcagcataaataagtttggccactgggagtacagtacaggggttgggacaacgatcccgtatttgaagacctacttctagcaccagcatcaagaactaaatccacctcaggactcacagaacccaggacaacttgccatctttgagcaacatatgcattgaagagtgtatatagaagcaacagtaaatagattaacagaggctaatactgtgattgattgacattggcaatggttggcaaaaaaaaaaaaaa

SEQ ID NO: 992 - DNA, 330 bp, Rattus norvegicus
  Genbank Accession No. AA901107
tttttttttttttttttcaataacaatatcgtttatttaatacccttgaaagtctcccatatctattcagtggtcacattcacaaacatggcttctgcaggttcagtagagtgccagcaaacaaaggacagcgtgaagatgtagctgtggtcatccgtgcacggactgggctcttgtccatttagctggctgtcatgtcaaggtttcttaaatgccaacctcagtgggttataaattatcggccccccgaggatttcagcaagtccagatcatccgtcttcgaatccatctcttggtactgaacttgatgtatcaagacccctcgtgccg

SEQ ID NO: 993 - DNA, 470 bp, Rattus norvegicus
  Genbank Accession No. AI012185
attagtaatagcttttattcggagtcctcattttccagacaggccacatgaaacacagccattaaacaatagcgttgagataaatccatacaatgtatgctgctttcgctgtcgtcgtcgccgtcgtcgtcattcaccaatcacttggtgcagcgaagaaccttatgaaatgatgggactgataaatgcacacagctaacctgcaaaaacactggggccaggagagtcagactttaatcaggtctcattcaattatgtttcaaatcaacacatcttgatagccaaaactcagatggaattaatgctctggtaaatgctgcctcttgtcaaaagaacataattagacaataatgagtaggtatatagtatgccagtccttggtctatttgatgaccccagcagcttccactccattagacaacaaacagcttttaacctggttctcataaagcatactgctcattactaca

SEQ ID NO: 994 - DNA, 588 bp, Rattus norvegicus
  Genbank Accession No. AA945712
actaacattttctatttattcattaataaaaagtgcatagtacaagcccttaaccccaatccaagaactcagtaaaagattaacaccaaaggctagatggcatgggctgatttgtttggcatgattcaaacattgagaaatagtacatcatatgaccccttttcctttaacaaaataatcatgggacaagtaatgatacacaggattcttcactgagaaatgtaagactgttcctatcttctattgcaacaacaaaatttaaaccatttgtcattttccttcttcgagttgctgttttgtgttttaaagtgagctggtcaaacttaagtacaaaatcacagagagacaaactttcatttagaatgacagacttacacaatccctttaaagtctaagatattggtaattccataaatgctatcacagacgctaaatgaaaccatggggcagtgctgctcaatggctactctggagagcctctgtacattgtaaagcatgtgctctgaagcgtgggacagtgtttagatacatggtaaaatcatttgttataaacagccccgatgttaacctgtcccatatggaaaacag

SEQ ID NO: 995 - DNA, 608 bp, Rattus norvegicus
  Genbank Accession No. AI170426
aaatggaatttatgtaaatttttttattaagtattgggatagatgacaaaataatgtaactggaaaaacaaatttactctgtttatatgaccactgtcctaagccattacaatagtttatgacacgtggcaagtgtaactcagacaataacttaatccagcagaagaacaaaaacatcagtagtactgagtgaatatatctctctcatatatatatatatatatatatttgtatgtatatatatagctttgcacaatcagggagcaaggcacataatgaaatgagtacatttatgcagaagaaaataatagcaacaaggctgaaagaaaaccacaacttcatccttatcaagctgtgcataatcctctgaataatgtcctctttcaggtacatgctttaaaaaagtatatttctacattatatctatttatgacaaaattctcacagctagaagtcagagtgagccttgactccatttttctttaaaagaaacagaagaggacaaccccagttaaagatactgtgcaattctctttgaaaacagtaaacagtatttttacaacacttatcacacgctaatcatttattttacctatgcatctcaggaa

SEQ ID NO: 996 - DNA, 624 bp, Rattus norvegicus
  Genbank Accession No. AI008643
aaatgtaaatatatttaaaaaattaaaacacctaagaaatgcaatctatatacatgaaaaggtaagatatttatacagtaacagctagtacaacatcgcccacaagcagcggtgctgtccattgtgttcagattttggtttaatgtcgtaatggtagatcagtgtcttcagggaaattatgtaaggtatacagcatgaggggctcacagaagactgcaaatgggaaattaatgccaaggaacagtattttctctaaaaacaaatattagtaaacaaatatcttaaactaatgaaccacaaaatgagcttattaagttcaagatatatagtcaacttgcataaaattacatgtggccatttcaaaacaatgtttctaaaataccagtaactctgactattgggatgtccacaggagacaaaatgtcattcattctcttcttatgaggaggtctggtttaggaacattacaaccatgttcttagaaaatgctacagcatccttgagaggtcacaatagtaaagcatcaatgcattctggtgccagcccaacacagcggttctggatgtgacccagactgcatttctgatgactttggcttttattctcctccacatatgtcacata

SEQ ID NO: 997 - DNA, 504 bp, Rattus norvegicus
  Genbank Accession No. AI060295
  misc_feature (1)..(504): n = a or c or g or t
tttttttttttttttttgaagtaaagaaagtttgttttggaaggaaggtcctggggagatttgaccccaagccccagagtagggcatagtagtggcaacagctgcctggtgttggttgctgaagcattaaaaagtgccatgacggagctgtcaggaggcagcccttgggagccagggctcagtgtgctgtcaccgtangggctgtgtgctgaggggcggggatggaggttatgtcttagctttcgtgctaattccatacgtatttgctgctagccacccctccctcagttgctacaacactggctcttgttctgctgggcctgctcatgaagatccacgccccgacttcggcctgctgcaccccctggattctggggttcactctttggcaacttctttgctattgccaggaagagatcattcacgttcatagcagtcttagctgaagtctccataaataataagctgttgtcatctgcatatgcctgagcctcttcatactcc

SEQ ID NO: 998 - DNA, 1911 bp, Rattus norvegicus
  Genbank Accession No. D89730
gatgttgcaaacagttttcctaactatgctgactctggctctggtcaagtcacaggtcacggaggaaaccattacatacacgcaatgcaccgatggatatgaatgggaccctgtaagacagcagtgcaaagatattgatgagtgtgacattgtaccagatgcttgcaaaggtggaatgaaatgtgtcaaccactatggaggatacctctgccttcctaaaacagcccaaattattgtcaataacgaacagcctcagcaagaaacaccagctgccgaagcatcgtcgggtgctgccactgggaccatagctgccaggagcatggctaccagtggtgtgatccctgggggtggcttcatagccagtgctactgcagttgctggtcctgaagttcagacaggccgaaataacttcgtcattcggaggaacccggctgaccctcagcgcatcccttccaacccttcccaccggatccagtgtgcagcaggctatgaacagagtgagcataatgtgtgccaagacattgatgagtgcacctcagggacccacaattgtagattggaccaagtgtgcatcaatttacgtggttccttcacatgccactgtcttcctgggtatcagaagcgaggcgaacagtgtgtggatatagatgagtgctcagtgcccccatactgccaccaaggatgtgtgaacaccccgggttccttttactgtcagtgcaatcccgggtttcagctggcagcaaacaactacacttgtgtggatataaatgaatgtgatgccagcaaccagtgcgctcagcaatgctacaacattcttggctcattcatctgtcagtgcaaccaaggatatgaactgagcagtgacagactcaactgtgaagacatcgatgaatgcagaacctcaagctacctgtgccagtatcaatgtgtcaatgaacctgggaagttctcatgtatgtgtcctcagggttaccaagtggtgcgaagcagaacctgtcaggatataaatgaatgtgagaccaccaatgaatgccgagaagatgaaatgtgctggaattaccatggtggcttccgctgttacccacaaaacccatgtcaagatccctatgttctaacgtcagaaaaccgatgcgtttgcccggtctcaaacaccatgtgccgagacgtgccccagtctatagtctacaaatacatgaacatccgatctgacaggtccgtgccatcagacatcttccagatacaggcaacaacgatttatgcaaacaccattaatacttttcggattaaatctggaaatgaaaatggagagttctacctacgacaaacaagccctgtgagtgcaatgctggtgcttgtgaagtcgttaacaggaccaagagaacacatcgtgggcctggagatgctgacagtcagtagtatagggaccttccgcacaagctctgtgttaagattgacaataatagtggggccgttttcattttaaacttttattcacataaagcctaccacaggcatttaaatcagccaaagaatatcattacattaaagtttattttatttatagctctatctagtacatctatattcaaacagctagactatggtaggaagtgggcatttaatccataagagtcaacatttatctttatcactgtgtgtaaattagacattagtccaacattcttcttgaagagagctaagcatatattatctagtgaaacttggattctttcctacaaaaatggggccaagcaatgatactgttctgtggtgaatagagaaatatacacctccacaaacaatctcatgaggattggccatctaaacatcaagagcaagaagggttttttttttaacttctttgtaagaaaatggaaaaaagtcaataaagatatatttctttagaaaatg

SEQ ID NO: 999 - DNA, 291 bp, Rattus norvegicus
  Genbank Accession No. AI010411
aacaaagcaacttgtacacggcaacatttaaaatgagcatctttttccttccagtgaaaaccgaaaaagagtaaaaaaagagaaaaaaaaaaaagagaaaaaaaaggaaagaaaaaaactaaagatgaaagttacaacagagaatgccaactccaaataaacccctacagcgtctgctggttctcccgtgagtggcgggctcaagtcttcatcaggagagttttattttatttaagtgtcaccttaaacggcaaggatgtctgttaaacgtcacaatgaaaccctcgtgcc

SEQ ID NO: 1000 - DNA, 605 bp, Rattus norvegicus
  Genbank Accession No. AI009669
gagattcataagaaatgtttatttggattagatgggaaaatcttcaggatgacataactgctgcccttttacactaaggccttctctgatgaccgacaggagagcaaggtctaccactgaccttttttcacagtagacagaaatgtagctagttgacaactcccttctctgtcctccccatcttactcccccaaagaagtctacttacaaacaatgcccccataaatgggtatccagattttaacaggacagaaaacactgaagtaaaatgtggaacagagggaacagatgccaaaatgattcccagagccaacaccatcacagaacacatgatctggattgccgccatcactttgatctctgccttcagatgtttcttcagactgtcttgcctttggtggggaggctggggtttgtctgtttgaggaaagctgattccatttggtgaagtcactgtgacggtatcattgatcactacttgtgggatcatgatggagttcccacagctgagcctgtccgccttattactcagtcacttccagctgaacgctcagaaatcccagaagctttaacctcgattttctcagtctgaactttggttccta

SEQ ID NO: 1001 - DNA, 508 bp, Rattus norvegicus
  Genbank Accession No. AA955298
tttttttttttttttttaaagatgagcatttattcactttacaaagagaatggtattaaattgccataaacagctccatttatagacaaagaacaactgtacatcaatcgcaccagcagcttgcccaggatgcccttcccgcttcggctgtgcagcctgctctgtccctgatggaagtcctcccagggagcacttttcttagtcacaggtgggaaagcctcgcatctgctcagtccttctgcagacgacagctctccatctgcacccctgactgaacgagttagtactggcccactctttagaaacaagacaaattactggtaatttgaaaaagctgtgtagcacaccaaaatacttatttatacatacataaaaaatcttgagtaagatttatcattttgaaagataaacagataccctagccctgctaagagcgggtaatgaaaaggaaccaaaatgttaaattactgaattataaaaatagtctctttggaaaaaaattccagca

SEQ ID NO: 1002 - DNA, 2225 bp, Rattus norvegicus
  Genbank Accession No. AF020618
ctgcagtacttgtacattgctaaataaagagagggactccaggaggagcagcctgggtctaagaggtaggcagaaggaggttttaggggcctgagcacaagcttgaggagagaaaggttattaaaaagccagacgcttacaggtctcagaagggctagccagaaactgtggctggggttaaggaaagggtttaagagtgtgggcttttggttctgaggatgtagaacgtgaatgttgagagaagaaccaagtggcggagttgggtgtgagcaatgctattaggaatttgaggcagggattcacgcgctgctgtgactattttttaacaatgactcagtgctgtgacctgatactgtttccagagcgacttctaaacaaattccccctttctaggccagacacatggccccaagcccaagaccccagcatgtcctgcactggaaggaagcccactctttctacctcctgtctccactgatgggcttcctcagccgggcctggagccgcctgagggggcccgaggtctcagaggcctggttggcagaaacagtagcaggagcaaaccagatagaggctgatgctctgttgacgcctcccccggtctctgaaaatcacctacctctccgagagactgaaggaaatggaactcctgaatggagtaaagcagcccagaggctctgccttgatgtggaagcccaaagttcccctcctaaaacttggggactttcagatattgatgaacataatgggaagccaggacaagatggccttagagagcaagaagtggagcacacagctggcctgcctacactacagccccttcacctgcaaggggcagataagaaagttggggaggtggtggctagagaagagggtgtgtccgagctggcttaccccacatcacactgggagggtggtccagctgaggatgaagaggatacagaaaccgtgaagaaggctcaccaggcctctgctgcttccatagctccaggatataaacccagcacttctgtgtattgcccaggggaggcagaacatcgagccacggaggaaaaaggaacagacaataaggctgaaccctcaggctcccactccagagtctgggagtaccacactagagagaggcctaagcaggagggagaaactaagccagagcaacacagggcagggcagagtcacccttgtcagaatgcagaggctgaggaaggaggacctgagacttctgtctgttctggcagtgccttcctgaaggcctgggtgtatcgcccaggagaggacacagaggaggaagaagacagtgatttggattcagctgaggaagacacagctcatacctgtaccaccccccatacaagtgccttcctgaaggcctgggtctatcgcccaggagaggacacagaagaggaagatgacggtgattgggattcagctgaggaagacgcgtctcagagctgtaccaccccccatacaagtgccttcctgaaggcctgggtctatcgcccaggagaggacacagaagaggaagacgacagtgagaatgtggccccagttgactcagaaacagttgactcttgccagagtacccagcattgtctaccagtagagaagaccaagggatgtggagaagcagagccccctcccttccagtggccttctatttacctggacagaagccagcaccaccttgggctgcccctaagctgccccttcgactgcagaagcggctcagatctttcaaagcccccgcccggaatcagggccctgagattcctctgaagggtagaaaggtgcacttctctgagaaagttacagtccatttccttgctgtctgggcaggaccagcccaggctgctcgtcgaggcccctgggagcagtttgcacgagatcgaagccgctttgctcgacgcattgccaggcagaggagcagctgggtccttaccttacccctgctttcagggccagagcatggacacgccttagaaacctaccccttcctctgtcgtcctcgtctcttccactgcctgagccttgctcttccactgaggccacacccctcagccaagatgtgaccactccctctccccttcccagtgaaatccctcctcccagcctggacttgggaggaaggcgggctaagcctgagtagttttttgtgtattctatgagtgttagtctcttaatacgaatatgtaacgccttttgcatttgtaaaaaaaaaaaaaaaa

SEQ ID NO: 1003 - DNA, 208 bp, Rattus norvegicus
  Genbank Accession No. AA955914
tttttttttttttttttggcagattagtcctttaatagaaaaatcccctggaaaaagtcaaaagccacatgtgcaacagtagcaacaacacacatttcctcaatccagacagtccagtttcaattcctcgccttgggaagtggcctgtacacacctacaaccacagcgtgggctcgttcaaaagggtccaatgtcaactggtcctgaa

SEQ ID NO: 1004 - DNA, 451 bp, Rattus norvegicus
  Genbank Accession No. M34331
tcctctttctctcgaaccgggcggcctcatccgcgaacagcgcagcaatggccaagattaaggctcgggacctgcgcggcaagaagaaggaggagctgttgaaacaactggatgatctgaaggtggaactgtcccagcttcgcgtggccaaagtgacaggcggcgccgcgtccaagctctccaagatacgagtcgtacgcaaatccatcgcccgtgtcctcactgtcattaatcagactcaaaaggaaaacctcaggaaattctacaagggaaagaagtacaagcccctggacctgcgacccaagaagacaagagccatgcgccgccggctcaccaagcatgaagagaagctgaagaccaagaagcagcagcggaaggagcggctgtacccactgcgcaagtacgcagtcaaggcctgagacgacgacaataacaataaagtccaaaactg

SEQ ID NO: 1005 - DNA, 5721 bp, Rattus norvegicus
  Genbank Accession No. Z78279
atgttcagctttgtggacctccggctcctgctcctcttaggggccactgccctcctgacgcatggccaagaagacatccctgaagtcagctgcatacacaatggcctaagggtccctaatggtgagacgtggaaacctgatgtatgcttgatctgtatctgccacaatggcacggctgtgtgcgatggcgtgctatgcaaagaagacttggactgtcccaacccccaaaaacgggagggcgagtgctgtcctttctgcccagaagaatatgtatcaccagacgcagaagtcataggagtcgagggacccaagggagaccctggcccccaaggcccaaggggacctgttggcccccctggacaagatggcatccctggacagcctggacttcctggtcctcctggtccccccggcccccccggaccccttggtcttggaggaaactttgcttcccagatgtcctatggctatgatgagaaatcagctggagtttccgtgcctggccccatgggtccttctggtcctcgtggtctccctggcccccctggtgcacctggtcctcaaggtttccaaggcccccctggtgaacctggcgagcctggcggttcaggtccaatgggtcccccaggtccccctggccctcctggcaagaacggagatgatggggaagctggtaagcctggccgccctggtgagcgtggacctcctggacctcagggtgctcgtggattgcctggaacagctggcctccccggaatgaagggacacagaggtttcagtggtttggatggtgccaaaggagatactggtcctgctggtcctaagggagagcctggcagtcctggtgaaaatggaactcccggccagatgggtccccgaggtctgcctggtgagagaggtcgccctggaccccctggcactgctggtgctcgtggtaacgatggtgctgtcggtgcagctgggccccccggtcccaccggccctactggccctcctggcttccctggtgcagctggtgctaagggtgaagctggtccccagggagcccgaggctctgaaggtccccagggtgtgcgtggtgagcccggaccccctggccctgctggtgctgctggtcctgctggaaaccctggtgctgatggacaacctggtgctaaaggtgccaatggtgctcctggtattgctggtgctcctggcttccctggtgcccgaggcccctctggacctcagggccccagcggcgctcctggtcccaagggaaccagtggtgaacctggtgcccctggcaacaaaggagacactggtgccaaaggagaacccggccctgctggagttcaaggtccccctggccctgctggagaagaaggaaaacgaggagcccgtggtgagcctggacctagcggcctgcccggacctcctggcgagcgcggtggacctggtagccgtggtttccctggtgctgatggtgttgctggccccaagggtccttctggtgaacgtggttctcctggccctgctggtcccaaaggttctcctggtgaagctggtcgccctggtgaagctggtctccctggtgccaagggtctcactggcagtcctggcagccctggtcctgatggcaaaaccggcccccctggtcccgctggtcaagatggtcgccctggacccgcaggtcctcctggagcccgtggacaggctggtgtgatgggattccctggacctaagggtactgctggagaacctggaaaggctggagagcgaggtgtccccggaccccctggcgctgttggtcccgctggcaaagatggcgaagctggagctcaaggagcccccggccctgctggtcctgctggtgagagaggtgaacaaggtcccgctggctcccctggattccagggtcttcctggtcccgctggtcctcctggtgaagcaggcaagcctggtgaacagggtgttcctggagaccttggtgcccctggaccctctggcgcaagaggcgagagaggtttccctggtgaacgtggtgtacaaggtcccccaggtcctgctggtccccgaggaaacaatggtgcccccggcaacgatggtgccaagggtgatactggtgcccccggagctcctggtagccagggtgcccccggtcttcagggaatgcctggtgaacgtggtgcagctggtcttccaggtcctaagggtgacagaggtgatgctggtcccaaaggtgctgatggttctcctggcaaagatggcgtccgtggtctgactggtcccattggtcctcctggccctgctggtgcccctggtgacaagggtgaagctggtcccagtggtcctgctggccccaccggagcccgtggtgcccccggagaccgtggtgaggctggtccccctggtcctgctggcttcgctggcccccctggtgctgatggccaacctggtgcgaaaggtgaacctggtgatactggtgtgaaaggtgacgctggtcctcctggccctgctggtcccgctggaccccctggccccattggtaacgttggtgctcctggacccaaaggttctcgtggtgctgctggtccccctggtgctactggtttccctggtgctgctggtcgtgttggtccccctggtccctctggaaatgctggaccccctggccctcccggtcccgttggcaaagaagggggcaaaggtccccgtggtgagactggtcccgctggacgtcctggtgaagttggtcccccaggtccccctggccctgctggtgagaaaggatctcctggtgctgatggacctgctggctctcctggtacccctggacctcagggtattgctggacagcgtggtgtggtcggtcttcccggtcagagaggaaaaagaggcttccctggtcttcctggaccctctggtgaacccggcaaacaaggtccttctggagcaagtggtgaacgtggtccccctggccctatgggcccccctggattggctggcccccctggtgaatctggtcgtgagggatcccctggtgctgaaggctcccctggaagagatggtgctcctggtgccaagggtgaccgtggtgagactggccctgctggcccccctggtgctcctggtgctcctggtgctcccggccctgttggtcctgctggcaagaatggcgaccgtggtgagactggtcctgctggtcctgctggtcccattggccctgctggtgcccgtggtcctgctggaccccaaggcccccgtggtgacaagggtgagacaggcgaacaaggtgacagaggcataaagggtcatcgtggcttctctggtctccagggtcctcctggctctcctggctctcctggtgaacaaggcccctctggagcttctggtcctgcaggtccccggggtccccctggctctgctggttctcctggcaaagatggactcaacggtctccctggccccattggtccccctggtcctcgaggtcgcactggcgatagtggtcctgctggtccccccggacctcctggaccccctggccctcccggtcctcccagcggtggttatgacttcagcttcctgcctcagccacctcaagagaagtctcaagatggtggccgttactaccgggccgatgatgccaacgtggtccgtgaccgtgaccttgaggtggacactaccctcaagagcctgagccagcagattgagaacatccgcagccctgagggcagccgcaagaaccccgcccgcacatgccgtgacctcaagatgtgccactctgactggaagagcggagagtactggatcgaccctaaccaaggctgcaacctggatgccatcaaggtctactgcaacatggagacaggtcagacctgtgtgttccccactcagccctctgtgcctcagaagaactggtacatcagcccaaaccccaaggagaaaaagcatgtctggtttggagagagcatgaccgatggattccagttcgagtatggaagcgaaggttccgatcctgccgatgtcgctatccagctgaccttcctgcgcctgatgtccaccgaggcctcccagaacatcacctatcactgcaagaacagcgtagcctacatggaccaacagactggcaacctcaagaagtccctgctcctccagggctccaacgagatcgagctcaggggcgaaggcaacagtcgattcacctacagcacgcttgtggatggctgcacgagtcacaccggaacttggggcaagacagtcatcgaatacaaaaccaccaagacctcccgcctgcccatcatcgatgtggctcccttggacattggtgccccagaccaggaattcggaatggacattggccctgcctgcttcgtgtaaactccctccatcccaatctggttccctcccacccagcccactttcccccaaccctggaaacagaccaacaacccaaactcaatttccccaaaagccaaaaattgggagacaatttcacatggactttggaaaacatttttttcctttgcattcatctctcaaacttagtttttatctttgaccaactgaacgtgaccaaaaaccaaaagtgcattcaaccttaccaaaaagaaaaaaaaataagaataaataaataactttttaaaaaaggaagcttggtcctcttgcttgaagacctatgtgggtataagtccctttctgcccactgggcttatgataccccaaatgctgccttttctgttcctttctccaccccctcttggggcctctcctccattgctccccaaatttaagtctcccccaaagacacaggaaataatgcattgtctgcccagccagcaaaggcaatgctgaatcgtcccaccagcccctcaacccccagcttacttccctacccagcaccttcaaatcctgccgggacattgggttctcggactattgaaggagcctaaccatctggcatctccatggcctctgcaacaaatccccacacacactttgtttttgagggcctgtgctgggggagccacctgcccctcgcaggggtttggagccaggcagggtcacagcagactggaaacatcggccacacatgtgcaggctgggtgggagagactgttctgttccttgtgtaattgtgttgctgaaagactacctcgttcttgtctttgtgtgtcaccggggcaactgtgtgggggcggggatgggggcagggtggcatcgcgcccagtttggtatcaaaggtgctacatctctgtgaaggggtggggtgggaaggaatttctggtgctatagaatctgagatgctcccctacaccagcaaatgttccttttgttcaaagtatttttttattctttttttttttttaatggatagggacttgtgtgaattttcttttcctgacggtgctatttaacaagggaggagagagtgccaactccagcctgctctctctctacccccctcttcactcttccagctcctgggcctatctgatgatctctctctcttctgaaaccctcccctcttgctgctgctccctaccctcagcttctctctctctctgtcctgcatcagggtttcagagcaccattttccaaagcacaaagcagtttttatccctggggtgggaggaagcaagagactctgtacctattttgtatgtgtataataatttgagatgtttttaattattttgattgctggcataaagcagggggaaatgatccagtccacag

SEQ ID NO: 1006 - DNA, 593 bp, Rattus norvegicus
  Genbank Accession No. AA944212
  misc_feature (1)..(593): n = a or c or g or t
ctaaaatgcacctcactaaatagaataagcttgcggccgcaatgtttttttttttttttttttttttagtttcaagaatcttttattttagctttatagttctaattatgccattgtgctgttagttactgcagttaatctcttactgtgcctaatttataaattaaatcttaacataagtatgtgcagaaaagccaaatacaaaggggttcaatactgccttgggtttcaagcatccactaggggttcagataaggtctctctagattagtgggtgtcaactgaagccagccttttacttcataggtgagaacatagacatcctccagtctgggtcatctggcacttgaccattataactccttgttataactgaatcactgcttctcttccccacgacattctgaggaattgaagctccttcggctggtggcggccatacttgactgagcttgcaatctcattagtctcccagggaccacgatgtggctactaggtggagacagcgctgctgacggggctcctganggatggtctttaaatgtagcaatgactcaaagtcttgtgagtgactgcagaaccgctggaaatct

SEQ ID NO: 1007 - DNA, 494 bp, Rattus norvegicus
  Genbank Accession No. AA926016
tttttttttttttttttgaggagaaatctggtttttatttctgggaaatagcaatactttttgttacatctcacaatctgcaagggaagggaaagtgagtagagatcgtggatggacatcttgtctctcactgtagggcatggaaggtgaggacaccccgctggatagacaggaatcaacaagacaacaagatcccttgtgcctggggtaggactacaggcaacagcacttgtggtctaagttcacttcctcaaggagaggtctccatggaatgaccatgattcccaacatggccagaaaacccatcaatcccactcatagggcagatgatcaaaggagccgcactcttccctcccgagtaacttaggctgaagtagggccggactggcccacagaaggtagcatgagagaaagtaaaggtatggcatctctctgtcacattgtagaaggaaacctcaccagcatcatagtccaagaaaatccctaccctctgg

SEQ ID NO: 1008 - DNA, 693 bp, Rattus norvegicus
  Genbank Accession No. AA800190
atgggtatagaagtttaatccatttctcttacaaggaggtaacagtaaatagtagaggggtgatcatgtattatggcttcaagggacctcatgcacagggcagcagatgaccagccccagaacctgcccacccacccccaaagctaccacagtggttccggtgaattgagtgctgaaaacagacacctcccagtaaacactgccagggttgaggaaagtgaggcgttttcctgcccatcccgaaccagatacagcaatgcaaggtggtgaatctctggaaggagttttatgtagttctctgacaaccctactctgccctcagggaggagcatggctcctgtagtgggtgggcttaaccgctctttctcactatgctgctgtagcagagtgggaaccaggccctactgcaggactagcagctgagtcagccagggcagaaatatccagactgaccaagtacaaggtttacttgcaaaaaaaggaaggctttagctagtttcaattcctcatgaagtgttatttcctgttgaaaaagcaaaggactaagccaaccgtctataaaattgccagtccttaaccaaggcctcaaatatgggataaaggtctctctttagtctcctcttcagggttctggggttccacatgacacccacagggttctacaggtggctacagaggcatggccccatatgg

SEQ ID NO: 1009 - DNA, 563 bp, Rattus norvegicus
  Genbank Accession No. AI010279
ttgcggccgcttccatttttttttttttttttttttttttgaagtatactaaaataaggttatttactgaaaaatgatacattggacataatctgtatatagaacaaagcaattaatggtaaacttaataaggcaccttttaaatcagatgctgtacaaaatacatttagtgtgttacatatcaaagatgaatctatgtttttggtgttttacaattgcataataaaaatgcttttttttaacctgtcaatgccttatgtacaatctccctaagtcattaatattttcattttatacaacatatgctacattttagtttttaagtgggaaaaacaaaggtcactaaagagcttaaataattccactgaaaggaagtacagagcagaacctaaaattacagtattacatctaactctttgcaaaagccgtccatacaggctttctttatggaacgatccttcccatgccctgtgggttcatacaggaccccagagaatcaggttctgcttgccctgttttcatgcctcttccagcccggaggcgagataactgtaactgtctta

SEQ ID NO: 1010 - DNA, 512 bp, Rattus norvegicus
  Genbank Accession No. AA926365
  misc_feature (1)..(512): n = a or c or g or t
tttttttttttttttttgcacagaagatcatcatctttagacagggaacaaatggctgggaattccgcctggcccgagctcgcggctcctcagggccaagctataacaaacataagggacacaaagcagggaatcatcagatttggtctcggaggtaggggagggaaacagcaggaatccaaatgaggacagcctgggtgactggactgggagggaaggcacttggctcagtctcctgttcccacccgggcaagagccagttgctcctcaaccttcagtggcccagaggctgctcctggttgagcctgtggaagaagcttttgccaaactcgtaagtgctgatcatgatggcgcaggagggcgcagccttgatgatcctgnggaggaaacctgcaaagagtcccctggtgccagattcagcctggattctccgaagcaggagccaggtggagtcaactcttggcggcttcactctcatagcctccactgctcccagtgacatttgtcgctgt

SEQ ID NO: 1011 - DNA, 432 bp, Rattus norvegicus
  Genbank Accession No. AA998205
  misc_feature (1)..(432): n = a or c or g or t
tttttttttttttttttccgtgtaaagtgtttattttgaagaatacaaggtgaacaatatccagtgtccatttaacctgaattattcagaggcttattcatattcaactagcattattgtaaaatactattgtaagaactgcagtaaaattttacacaagtgtttctgttatccgccaaagacatggatatgacaattccaactcttatttgccacctccaagctattcaaaggtccacaccacagtcccgtggtccctacggggctccgcttccctaacaccgaaggcgctctgcacagctagccacgctgcaatcctttgcttcaggcactgcggcaggttctctccacgtccccaaaagcagactctccaaacctcggtggttcttttcctcnccctgccttcccccacaagtcaaatgacccagcagt

SEQ ID NO: 1012 - DNA, 335 bp, Rattus norvegicus
  Genbank Accession No. AI071990
tttttttttttttttttaaataaaaccattacaatttattaaactccatatataaaaccataggcatggcctactgtccttatatagctgtttctaactttaatattaacaaacattagaaagtccactgtgctgttataagcctggaaaagagttatcacagataacagtaagattatccctgtcctcggtgaagtaacttagaaaccgtcactcagaacaaggcttctgaatcaacgatgatgaagacataaaatagaaacactcaatttgctcacacaaatgctcacaggttctgatttgtctgttttagatttctgagacaagcctcacta

SEQ ID NO: 1013 - DNA, 558 bp, Rattus norvegicus
  Genbank Accession No. AA859348
tttttttttttttttttaaggatcatcctactgctaagtcagtgtctcctcttgattctagtgttttggccacgcctcaccaaatgtctgcaatgatccagtactcacaacatgttcaggaggagctgggtcagattttgacagagggtatgggaagggaaaggggagaagaaatcgacatttattttattatttattttaaatgtttacatttctttgtgttgttccaagcctgaatagaaacagatagcattaaaggactctgttcccaccccttctctgtctctctctcccccacttgtgctaacttaggataacactctctatttcgttttgtttctaaagtgatttgtggacttgtgccgtgtgaactgcattaaaaaggttctgttttcaaagatcgattgtcgttcctgtggggacagtggctcctaagaaatctgcattgtaggagaagacaatgaaagaccctggccctgtctctcaaaacttaactctctgtatgatttaaaaaaaaattccatttactttactttgtggttacttgattttgaggaa

SEQ ID NO: 1014 - DNA, 351 bp, Rattus norvegicus
  Genbank Accession No. AA997851
tttttttttttttttttctggtttcatgtctgatttattggtaaatatatgggcttggcccaggaccagccacctggccactaccctcctgctgccagctcaatggatgggctgggaggagatctctggggaggggctgggcttccccaacccacccttcttgccatcttctaggccaatgagctgagcacccctcagcctctgtttccccgaccaaaattgtgctagtcaaggtgaggaggctcctggggccagccagatgcaggtggctctgggctaagccaggcgcgtgtcttgagtcctagcctcccaccctgcccagttcatcagcacaggatccagcttgaaggc

SEQ ID NO: 1015 - DNA, 504 bp, Rattus norvegicus
  Genbank Accession No. AA899491
tttttttttttttttttacgggagcacaacagtttattatttcttgcctgaaaatggtgcaaggtcagaacactcagagcgagcggcccttgtgccttcagagaggacagacccttcaaccagggctttccctgagatatggcctctgctttccaagactctgagggcggctcatacatgcagccaccccagagggagagcactggggcctggacagctgctgttcttctgtctgtctagctatggtccaccggcctgaggcatggccagcacacttctggcctgccctccacttcagtcaagtgtcaaagcaaaagcatctgcaaaggtaacagaccgtccttagagtctggtggttgggagaagccaccactgggcttgacaaggtggagtctgggccatctgtgggaaagttaggacactaagggtaacaagcacgattctggagtggacagcacgtgtgatctggagtttagttacttcagcctcaagtctctcccacag

SEQ ID NO: 1016 - DNA, 539 bp, Rattus norvegicus
  Genbank Accession No. AI179609
gctggaacacttatttatttggtctaataaatcaagatctgcaaaaaacaaacaaacaaaaaaacccacaataacctctaaacataagataagaaacctctaacattaacattcttcaattttgagtaagctctgcagtacggaaaatatacaaacttcaaatagctgcaaaaatagtgtctttgggtgaaaatagagtttctacatcaatacaagaaaaataggcatttttctaattcaatccaaccctggggtgggtagaggatatggagctgctatgtgtcccctggggcaggtggagggtatgcggctgctacatgccccctggaggagtgccaaatccttcttcccactcttcattttgggccgggatgctgcttaagacaatcttcagtcagggtaaaactgagatgaaaatgccacttgggaaatctcgtggtcccctgccaacagacgattggtcaagtgttctggccccgaggaccactctggtcagctcctctaggaaggaggcatctatctggtctgcctttctgtgt

SEQ ID NO: 1017 - DNA, 177 bp, Rattus norvegicus
  Genbank Accession No. AI059916
tttttttttttttttttatagagaagcctataagcttagtcctagcttctatgtggacattaaccacgttgaaagtgcagagccgggagtcgccagcctgtggtatcagctcacagaaagcggtaatacggttatccacagaatcaggggataacgcatgaaagaacatgtgagcac

SEQ ID NO: 1018 - DNA, 554 bp, Rattus norvegicus
  Genbank Accession No. AA859885
tttttttttttttttttgttttacctttatttattaatagtaacaaaaatcagaaataacaaaaaccagttaaatgaaatatggaagcacagtaaatacaaacgcatcttcataaccacacgggcagcagaaatctgttgaaactgttttctgaagtttaactgtttaggtcattggcgtcaccaaggcattcagagtgctcacatggacttcgctgccggtggacgagcctgcttcccaagactgacagtagcatccagagccctggcatatgcaaagacctccctgggtcctagatcttgagagatactgatgttaacaaaaccaaaccaaaccacagagcaagcccagggagcctgcagtcttggcctaaaggtttctagaggacactaggaactgaagtagatgttatcctgcttgttggccccatgcaaacctcaacccaagtcttcccaaaccaggttacttagcttttcatgaatggttcaagggtcacaggaatctgtggtggttcagacaacagctgccctagttacacagaagcagcagaactt

SEQ ID NO: 1019 - DNA, 483 bp, Rattus norvegicus
  Genbank Accession No. AA963201
tttttttttttttttttaaaggacaagatttaatacagcccgggatgtccacgacctctgtacagcactgaacagcaatccccctgcctcagcctcctgagctttgattctccttggtgcaggggatggaacctgagcttcctgcgtgctaggcaagccctctcccaaccgaccacatgcccagagagccggagcagtggtgctccattggtgtgctgcaggagacaggcacccgtcctgtccaccctacagccactgctgaggcttgagggtgtgtgtgtgagacaaggtctaatcctgccttgcctgtggctttcccaggggctggagacccctcccctcacccccggtgtcccgatggtcctccaggtctagaactttggaggattcaacaggaaatatcagaaaaattgggggggggcaaaattcaaagcacacggaagacgagagatcaaaacacgtgtgatggtgtatggacgctcc

SEQ ID NO: 1020 - DNA, 491 bp, Rattus norvegicus
  Genbank Accession No. AI070141
tttttttttttttttttatcaggagatttaattttgtgtatcaacattgaaaggtttacatgttaaaaaaaatttacaaaacctagtcttttaactgggagaccctctgccctggatgtggggcagccaggcctctgtaccgtgagcctcagtagcaggcaggtcctcagtggccaacatggccttgtcagtcttagcttaaagaaactgaacccagcaccctggccaagagcccaggtttcaagggatcttcgcttttgtcgcaggactgcctgccccatgtaccaggcagtgggctgcaggtctgggctgtctggctttgtttctctggtaggcaatagctgtcacggtgaggcagagaggcaaccagaagcaggagctgtggccccttgccctcttgcagggctcactgctgggtttacatcccttcctttatctgaagtggggccaaaggccggagggtggccggaacagaaggcaaaatggcggcc

SEQ ID NO: 1021 - DNA, 508 bp, Rattus norvegicus
  Genbank Accession No. AI060314
  misc_feature (1)..(508): n = a or c or g or t
tttttttttttttttctcaggctctggctgcagagcagcctttattctccctgctagtcaatcaagctaaggaacgcttcctccaccgagcggtactggtgcaactggatctggacctccaccgacaggggctctggctggtacccgctttctacggttggagccgccgcttttgacttatcttttttggagcctttctttaccttctttgaatcctgtccgctgcccagcaccctcagcacaggtggatcctggcgcagctctctgggtggctcctttttcttcctcgggcctttgtccttagcaggctcctctttctttttcttgtcgcctttccccttcttggcaggcaagggactctcaacaggagttggtaccacaggccaagagatgatagtggtcccagacagcatgaaggccttgacccttatcagctcctttaaggtgtgcttcatctcatangtgcaagggatgacatctgcccaaagcttgtgcatggtgctgaaga

SEQ ID NO: 1022 - DNA, 479 bp, Rattus norvegicus
  Genbank Accession No. AI102706
ggaagcatcctaaaagcttaggagggtggacacaaaagctacagaacggacaaaaataaatatacaaatctacccagtcactggtgactaagccgccctcctgaggaaggcgacctgaagtcataaatagaagaaaaatcccttacagatcatcatccgacaccaggcacagaacttctcataacttaattttgtcctaacatataaaagctttatacacgtgacggggacagtcctgtaccctggtggcccagcttcaatccctattagtgtagagatgtgtgttaagcggtgggttacagcccagagccagtggcggacgtgaagccgagggaggggcaatcctggactcccggttgggtccataagaactgcctagttttttactatctttaattgtcatagggccctgatatagaaacctgaatggctatggagcacagacaggcagaagggaccagtgcaagtgtgcaccgtaa

SEQ ID NO: 1023 - DNA, 461 bp, Rattus norvegicus
  Genbank Accession No. AI103059
aacactgcatatattccttatcgttctgttgatacaacatggagaactttgtaaggagaaaaaccaaaaggtgctaagagaaaaagaggtgcagaaaccaggtaagaagccaggaagaggctaagataaaccagagacaagaaaggtgggtaggtaagcatggcgatgcacacctttaatgccggaaacatttgggaagcagctagtaaatcctaggccagtctgagctacataatgaaacattctcaaaatatcaaagtaagtaaacagaaaagtgtgggtggagagaagccccctcatctgctgcaacatttaacccttgcagtcccagaagcctagacagaaagctgctgggacaccccattctggcttctcagtacaagtgagaggtcaccgataagacagatccatcaggaaaaggaatacacatgtaggagctgagacagcagccagccttgctg

SEQ ID NO: 1024 - DNA, 584 bp, Rattus norvegicus
  Genbank Accession No. AA892270
aaacaagaatttatttgtagaaagcattaaaatcttctcaacagtctccagtcactttcaacaaactcttccctgtatttccctgactagttaacagtgttcaactatattacattacctgtcagcctcatgtgcacaactaagacagagaaagtgcttggagcactaaatggggaaaagaaaggccaacaggcacgctcaaagctgcagcagtggtgccacattcctgagcaccgtttctctcaccttcagggtcagaggtgcttctcaagtctctttaaaagacaggagatgaggaaacaatctgaggaccttgcactttatcagagtccctagactagaagatgaaatgaataagaggaggagaaagcagggctgggaagcagaggcgggagagatggagacagaaaggctgtgcctggaggagataaagtctctggaacttgctatgagttcaggggataaaaagcagcagccatcatctgagaggtggactagagaagagacaatctgggattttataccttccaagaggtggcactaggttctacagtggcaggcactgagttaccgccaagtttaag

SEQ ID NO: 1025 - DNA, 523 bp, Rattus norvegicus
  Genbank Accession No. AI235325
gaatactgtattgaaagccaagcattcggttacacacgaaattatacaattatataccgcttcacaaaggcagtgaacacattacagtctacaaaatctactttacagaaatttaaaaattctaaatatcaaaaagtacagctgaagaaacaggtataaatttggcagccagtaattctgacagggaagttgcagcttgcatgactttaagtatgtgaatttgaaaatgttgagtttagagtaataaccattgtgctttgtgttgatctgaaaaatataacactggctgttgaagaagcatgttcaaaaatagtaattcacttcaaaatgttatacaaatcatggtggtttctgtgtaccctaaagcttcagtcatctaatcttagctcaggtacattactgaaggactatgaattcttacagtgacgcttcacaccagtgccatgcgcacacagggtgattcagaaggacagatggaacggtgacaatgtgcagaaaagcaatcaagggttatgggcctgtg

SEQ ID NO: 1026 - DNA, 612 bp, Rattus norvegicus
  Genbank Accession No. AI232088
ttaaagtgctcttcagccaagcaccgttatttgtttctaatccaaacactttggggtttcttcccatagcaaactgagtcaaaaatgaaaatttccagcataaaaactgttacaaaccaatctaattcattttgtaaagtgccactgaatttagccttcaagaattcaaagtaatacaaaacttccaatatttttgtttacagaaatatgaaattccaaaaatgggattgttttgtctagagcagctgatagcatttgtcaaagccaagaccgcacactgctgccactgtgggtaaggcaggctgctcagcaccgtccacgctgcttctcagaacaggcccaggccgggggcacagctcagcttcacggtaaaggccagcctatgatctgacaggaaaaccaactgcgactgaagcaaagacactcaagaggctctccacctgatgcaccttccctgtgaggtagcacacgctgctgccactaggacagagcgctgtgactgggtgacagattaacaggggaacacttgagtccacagcactctggaatgcagtataagacgcttcaaagcaagttagagaggaaaaaagtaaaactccacctgacaccacc

SEQ ID NO: 1027 - DNA, 573 bp, Rattus norvegicus
  Genbank Accession No. AI175812
ctcagaaatttactttatttggtgagcaacaggatataagaacaatggtaagttataaaggacaggaacaaatcagtgaaaactggtacagattttgcaaaactaaatgacttcttctcagcctgcaagtgtgtgggcccacataaagaaggaacttatttatgacattaaatgcacaagaaaaatatgggatagttaacagttcgtttggctgaggaaaaatgtcatttcttgcatcctgctgcttgctagtggaattggaccaaaggcggtagttaaggaaggaataaatactaaagaatttgctaaacaaatggccagcacagagttttcatttgttccttggaaggcccaagctgaaacgcaaagtcatctatgatcacaagcacagtaaacttcaggagaggtctgcaggagcaagaaaatcaagcttgaaacttctgatttgccaacgaagagaaagaacatgacgttttcagggagaaccaacctcaacaagtcgaatcgtggctgtaggggagagtgagggtttgcagctagagactttaaagaacagtgtgtgattaaccatgc

SEQ ID NO: 1028 - DNA, 418 bp, Rattus norvegicus
  Genbank Accession No. AI228760
gagacagtctcattagtccaggctggctcagaactcagggtgtagcagaggatgaccttgaatgtaggctcctttgccaccacctccagagtgccgggattgcaggcctgggccatcatgtccagttttatgcaatgcagaagacagaaccagggcttggtgcatgctaagcaaaccttctaccaattgagctacagccccagacatgagtgtttttacataatgttatacatttgaatctccttttgaatttgctgtgcatttcctttcagagatggctcgagctccttgaggctgcttatatagaaactgcagggtagagaagagatgagaccatatttccttgaggcccttcatctcccagggaggtaggtctagagaggagatagctggaagtgtgtctttcactgaggcgggc

SEQ ID NO: 1029 - DNA, 419 bp, Rattus norvegicus
  Genbank Accession No. AA893860
gaattcatacaaaataacctgggtacagaaaacatcctccatgattttccattttggagagagacatttaatggcccccatctaacagcattctctaagacttgtccagaccagaaaggctgatccacgaagactcggcagaaccactccttgctcatcatgaagccatgtttcccagtgcacaaggtcacgtgatgggcacccatcttcctctacactgatccagctcgggccatgtgcctgttaaaactcctcctctgcctgcttactgcgcaactgcttgagctgctgcagccgctccactgtttcccccacagtccgctctccgtggaccttgttgtctctcgtgcggatgttcacagtgccactggctttctctttttcaccaacaacaatgatgaagttatactgtgccaact

SEQ ID NO: 1030 - DNA, 652 bp, Rattus norvegicus
  Genbank Accession No. AI236753
cactacaagtcattttaattctaacacttatgtcaacatttacagcataaatcactcatgttataaaagaatcattccttcatctagaatgtgattgaaattagatattggtaaacaggcaatgtaaatacctcagtgtttgcctctgatagtttgcaatgaccaagacatgatactatagcctcatcaagtgcaactttgtacatgtctgatgcatatatgttgtgtacatgttgtggactgagaggacatcttcaggcactggtcctcacctcctaacttgagataatcttgtttgctgttgaatgcatcaagctagctggcccatggtcaaattttcttcctgtactaaaatgtacggcagcaatgggataaatcttaggttaacagtatattcagatgcactgtgtatagcaataaaaagctccagtgatgttctctttctaaagacacactgtccttctggggaggtgggatctgactctaatctggcaccatgtctagctcattttacaaaattaacctttacaaagatctacatcagcatctagaagagtcaccaatcaatgatcaagaaaactgttatttgcttttctttctttttgactgggtaatttccttaagctacattattatgggctaactggaaaac

SEQ ID NO: 1031 - DNA, 594 bp, Rattus norvegicus
  Genbank Accession No. AI170793
gtcttaactacttgaattttattctcttttgacatgaaattgtggaacactcagataatctataccatgttagtattcctataagagaaaacaggtaaataaagtctgttaggcaatacccatacactttactgcaagaattagtggcatttaaaaagtttctggttcataactcatagttgttaaatgtgcatgacttcagtgttaagacactgtatcttaaaacagtctcttataatacaaactcatttacttagtttactgccggcttcacaggtcagaggaatagacacgttgtgccagagtcagagggtgaataacattctaaatgggagttagtatatgacctaagtaaagtcacaatctgttaatacaaccatggattttttttcacaatgttatcagatccattggaggagtgaagctctgttttccctgtgggcaaagttattaaagttcttcactttcatagagtccggattgagctgccagacgctgaaactctccttcagggttgaaagcttgtttcacatccaaacctttcccatttagggctaaatatttgctgaaagttggtcgaacacgcatttgctt

SEQ ID NO: 1032 - DNA, 378 bp, Rattus norvegicus
  Genbank Accession No. AI072945
  misc_feature (1)..(378): n = a or c or g or t
tttttttttttttttttctgcaaaactaactctttcactttcctgtcataaaatcgcctctgcaaacacaacttctttacaaaaaaaggtcacaaatgacacagactctcaggaaaacacatttctatggtctctgcaaacacctgtaactggcacccaggtggtggctcacctggggaagggggagggggaaatcncccctggggacagaggcgaaataccagcccttatttgggggaaaagccaattggcacttggacggtatgggagctaacacaggacagggtgggaccggactgtatccctctcaaaccctgtgagagcccctgttttataccctggggcaagggggctggggctgtgctgcanaccctggca

SEQ ID NO: 1033 - DNA, 158 bp, Rattus norvegicus
  Genbank Accession No. AI058527
tttttttttttttttttgttaaatgtttccaatccatcaggatccaacatacaggacaaaccaaagttatttgcttgtacccacttagcattgacctgttatccatgaactacacagtaataatcacttttgtcaagaactgtttttaagtcacaaca

SEQ ID NO: 1034 - DNA, 537 bp, Rattus norvegicus
  Genbank Accession No. AA891838
aaagagtctctgctgtctacagggagcaccctgcagacaaaattttattctctatagaaacaaagtcactgcccagcacctcccttgtctttatccatagcagaaaaaccagccgctccctctagggggcgacagcagtcctgggggcgaccagtggagatgaagtacttgctggaaggccttggttctggttcccagagacagctgtcgtcctcctcctcctcagactccccctcagactcaggcacgctctcgggaagggcaacggccatctgctggaatctccctgactgggcatcccacatgtatttgatgggcactttgaattcggccatctcatacccaaacagcttcaggacaaggacctgctctggggtcagcacgtcaccctccttgcacacttcatagtcagacagcaggggcaccagacctttcttgagggcagtgggcagtcccagctgcctcagctgtggctccatggaatgagggaactgtttcagcggccctggatccaggctcacagttaaagttgctttg

SEQ ID NO: 1035 - DNA, 325 bp, Rattus norvegicus
  Genbank Accession No. AA944786
  misc_feature (1)..(325): n = a or c or g or t
acccactcttggggctacatagaatattttaccattttaacacatagaatatagcgcatacatcttgaaactactgaattaaggcaagcccctgtgagttcggtactccaaaaaccatgttttaccaaaaaaagaaaaatgttgactcaaaccagtggctttagacatggggtacccagtcaatcttcacaacgggagtactgctaactgcccccattacctcccggctctctatacatcagaagggaagtttctagtttctgtaactcaagatgggtggattccatgtgggcaaagtgtgtggggtangggagcagggctctgt

SEQ ID NO: 1036 - DNA, 526 bp, Rattus norvegicus
  Genbank Accession No. AI102472
aaatacaactatcttacagatttattaatgaaaaatactttacaaaaacagtatgctctgccctaaaatagtttagctgactcttgagagtttaagggtgactgagcaagtggcagtaatggctctgctgctgaggacaggagggagtgttagtgtgcccaacgccacctgttcagaagggcaaatagtctattggcagctccccactccaggcctatggtctgagtcacgaggaaggctgacaggccacacctgggcagctgagcttcccttaagaacatgatcagaatcctgactactgacaggagatggggaagggagttaggtaatatggacaggtggataaacaaggagtataagttgggaatatagtagggccaggagttgagggctctgatggagatgggggctaaaagaaaccagaaataaagtagcccagacaagcctagaacttgctatgtagccaaggatgaatttgaacctttgatcctgctacccccacctcccaagtgccagggtgacaggt

SEQ ID NO: 1037 - DNA, 693 bp, Rattus norvegicus
  Genbank Accession No. AI013508
ggagagcaggagaaatgtttttatttgaagagcagtgtggacatgaaagacagaaagcaaggaaggggttccaagggaccagcacctttctcagcaacccctccagggggctgcctagagatgggctggcaggcccaggcccaggcccaaacaaggcctggcaatcccttgggagagggtgcctgggaaggagggaggcaggaggcctggggttcccacggagagaatgcaagaagccgcctggtctcaccgatccatgctgtcatccgtagggctggagaaacaggtctgtaacagcttttcacagaactccagctcctcctggtactcctcatgctgctgcagcagctggcagcgatgacggagcagttcctccaggcccagctcaggctcccggcattctcgaacaccctgagggaagtctgtcacaaggctgcacagggctccaagcacatgctcatggaaaggactgtgttctgtcctcacaagggccaccagctgctggaccatccccatggagcaaagggttcctttgtgctcagggtggcccaccagcaggttctgcagcaggaatgctgacttgaccttgagcttctgcacttgctgctgcatggcccgcatcagcactgagaatccatccaggcggaggaactgcagcaatccagcctcctgctctcggacaagacaggagat

SEQ ID NO: 1038 - DNA, 575 bp, Rattus norvegicus
  Genbank Accession No. AI236332
aaaaaagaatcaaaacagaaactctaagtaccagtgtgtacattgtacacatttaaatgactcacaagaatgaagttttgtttttcatatataaagatgataccaccttgttcttcatcaaaagatgttcaagaattctgcctccaaaccacatacatgactgccattttaaacagaccgaatttcaaacatgcaacaacgccactggtaataaagctttggaatggatgctcactctattatttcactacaaacgagatagaaagccggcgagttggaaattttattctaaagcacaatggaggtggtcattgtctataccggcacacctcactcctctgctgccatttttagcaagtattctttgtcaatcttgaatagtctccatccctcttcactggacagatccgaagcacctcttcttttgtagaagttgatagatggttcattccactctgctaccaagaagtgcatactgctgcagcgacacttcatagcaacctggcttagattcttcaaaatttctgatcctataccaaagcctcggtaatcactcatcacaaagaagtcttcaa

SEQ ID NO: 1039 - DNA, 513 bp, Rattus norvegicus
  Genbank Accession No. AI234712
cctttatgtaatggtaaagtttattttctctttttagtaacaattagaggacaaaatgtttaaaatttgcagtttaaaacatgcacattcacaaaaggctgatgacagggaacagtgcatagaaatggattttactcaacatttgtaactatgtagaaaacacagtgcatcaaacatcaggatacacagacctgagagaaccactcatgcagtgccacaatctttacagcagttttggcaggaatggcttttccacggagctgaatgtcgattttatttttaaagcaaactgcggcttttcacagctggctttcaagggttgccttctaactctaacgtcatacacttgagaaggtgagaagtgagcccgaagaggctacagagggcactggctacatttatggcttctagtctatgactgggaatctcatctccactggagcatacttaccaaaggaaagtcgctgttaattcaaagtgagcacacaggccagtccacctttcttctactta

SEQ ID NO: 1040 - DNA, 475 bp, Rattus norvegicus
  Genbank Accession No. AI228313
gtcaaataatttgtcatgttttaatgggatgattaaaataaaggctcaaataagttttcaatatattaatttctttaaagtcatcttcaagcaaggtgctgtttaagaaaaaaacttagctttgtccacagatattaaatctcaaaagctacccaaagtaattttgacattggatgcagctttaaacaaaaaaaagaaagaaagaaagaaaacacctaggtcttctcaaagcaaattatacaattagagcccccaaatttgtaaactaaacattctgacacaaatgcaaacttaagttggcaacattaaagaaaggtcacaagtgcatgtgtagatgtagtgcttgccactgagtagagaaagtgacgtccatttggccatcagagaaggggactgcctagaaacctcccaaaccagttagggttaacaagaccctcccatcatcctacagcacacaggaaaaccagaaaagaac

SEQ ID NO: 1041 - DNA, 317 bp, Rattus norvegicus
  Genbank Accession No. AI045632
tttttttttttttttttagtttttgttcaggaccttgtgtgtactaatcaaatgttctacccttgcgttatataaccaattccttccccactcttttgactccaccactcactttgaggaaatggtccgaagggctgagttgtcttgggaactgacgggagagcagtcaccattaatgtgcccttggtgccatgtgtcctcaccccgggcacaccattgcctcttcttcgttttcttcttcatctatgtctctgttcactcaaagttaacaataattgtaatccataaatgagtttatatttatactctaacatgtc

SEQ ID NO: 1042 - DNA, 547 bp, Rattus norvegicus
  Genbank Accession No. AI171263
gacagattagtcttttaatagaaaaatcccctgcaaaaagtcaaaagccacatgtgcaacagtagcaacaacacacatttcttcaatccagacagtcgagtttcagttcttcgccttgggaggtggcctgtacacacctacaaccacagcgtggtctcgttcataaggctctagtgtcaactgctcctgaggcttcatgttctcttgctgcatctttttcacttcagatgcaaacacagcttctgctgaggctggggaatcaatgcagttggccttaatggaaatcacaaagtgtcctccattccgcaggaaggtgtgggcattcagggccacaattcgggtttggtctggctgggccacatcggcaaagatgacatccaccattgcaataagcatgcggtatttgtgtgggtgccgagcattttcaattacaggaataatgttggtcctcttcttggccaagttgatgaggtcacggccagagcggtgggagaactcaactgcgtaaaccagaccatccgggccaacaatgtcagacacgtgggaa

SEQ ID NO: 1043 - DNA, 497 bp, Rattus norvegicus
  Genbank Accession No. X59375
aaagttgctgctaggcgctcgaaagcgagcacctcatctcagagatctggagcggccgcgcttgcggagctgtcaccatgcctctggctagagatctattacacccttccttggaagaggaaaagaaaaaacataagaagaaacggctggttcagagcccaaattcttacttcatggatgtgaaatgtccaggttgctacaagattactacagttttcagccatgctcagacagtggttctttgtgtgggttgttcaaccgtgctgtgccagcccacaggagggaaagccaggctcacagaaggctgttcatttagaagaaagcaacactaatcatctatacaagttcctgaattcgtgtttttcacagaaagccttatcaactttagttactctaccaagacaatgtaattattgtttgattttataaagtctacaacaatgatctcctattttggtgtcagtttttcaataaagttttacttatgaacaagttca

SEQ ID NO: 1044 - DNA, 448 bp, Rattus norvegicus
  Genbank Accession No. AI237009
tgcacaaaaatgatacatttattgaaagagtatttttttttaatacaaaagaaagctctgtacagaggatgtgaccatgtccactattcctgggtcgacatcccaggagaagtagaaaccacggatatttccacacatactccacagtcacacatatattcactcagacacaggcacacacacacccccagagccacttaggaagggaaacaccaagggttgctgcacatagaaatgccacctcagtcctgacaaacaggttctcccaaggccacaatcacacagcacacgttgtggtaagcactttgcctgattcactcgccctggctctatcttttgtgaggaggaatcaacaccccctccggtgttgggggaggggccgtgagtgggtggcagtggagggaaacaagagcagagaagggggctgggcagttacagacctgagtcc

SEQ ID NO: 1045 - DNA, 657 bp, Rattus norvegicus
  Genbank Accession No. AA849028
aaccgttaagccatctctttaattccccgtgtctactttttaagaaaaatgttctatatgaaccaaaaagacatacatagtaatttacccttcaagggtaaatgatcaaaaaagaacattttaatgttcaaatatacaaagcacaataaatacagttacctattgtgtaacacagttcaagctgaatagacagtggatataaatagacggtaaaacatcttgggttatgagaatgaatgccttttgccctgtaactcttgaaaagtagtcagattatagggagcaagatagcaactagcagtttcatcactatggggttttcagagtattttataaagggtaagaatcggtttctattttctgtctttaatcttgcatgctttgacagttgttaggcaactgaagttgaattagacgtgtatttttgtttttttgaaacagagtttcttttgtgtagccctgcctgtcttggaactaactttataggccagggtgtcctagaactcacagatatacctataagaagcttcttgttaagtaagattctccagatttgcctgaaactcactcactccttatccaaagttgacctctaaattctcctatcttaccttctagagaactagaattacaatgtatgtggcaacatgccttgtc

SEQ ID NO: 1046 - DNA, 587 bp, Rattus norvegicus
  Genbank Accession No. AI178736
ggccatttcataatttcattcttttttacagttatctcaaaatgtaagaattagatctgattgaaatgctacatttagtaagaaaatcagcaaggaagtgtaaccccaacatgacattatttgccaatcagaccagtggaggtcctccgggttagggcaggagactgactggatagaccattagaggaaggagccatgcctgagaaccagagccagcccagagtccaccctggtcacggtcagctgagggagctgttttagagtatctatgaccatgaacacagtacaatttgaatatcccaaaaaaacattattgcaggagccatggcagggcaggcaaaagcccacccagtcccaagggaaacaggccaccactacagaaggggaccacaagttgatgatgttcaaggcaagtcaacatcagggtcttgggtccatctcattggaaaagggccttcgtgttcgtgttgggacggagcatgtgatgctctgacgcaatgccgtggctgaagctccagcacagcttacaagtcaggaagtagtttgtgcagatttccttacacgtttcaattattagtgacccctat

SEQ ID NO: 1047 - DNA, 512 bp, Rattus norvegicus
  Genbank Accession No. AA849766
gaacatcatagccttgcctttaggtcaccaggagcctccaagctctctatgctgtcagcatgtgtgctgtagtgtgcgggtgagagtgactgctcatgggatagatggctgggttgtgtgctccctgctagtccccacctctctgtagggaaagctatcgtaaagtagccctctctgcctccagccttcactgctcctgggaagaactttgcagtgagtgagtgtactccttgcttcctggtttccgtgcagtggtgcagtctgggccttcggcttacccaagccagcagctctgcatagttctacttagaaaacaggccctgagactggtgggccacatggctgctacaggcgcagcctcttgatgtcctcattgcggaagtctatgcgcagagccagtacctgtcgcacttcagcaggggtgaggcgccatgtcaaagggccagagttagcaccccagtaatctagtatctcggtcacccgctctagattaaggattgtagccatctggg

SEQ ID NO: 1048 - DNA, 478 bp, Rattus norvegicus
  Genbank Accession No. AI230002
ttaatacacatccatgaaaagacaaggaaattcaaaagtgagctagtacaggtcttccaaactgaggtacaaatgcctccgttcctccagcaattcccactggtattcccatgatgcaaccgtctgtggcaacagtctaccgtaggaaggggtggaggcagggcaggaacgcagagaaatgtgtccaattcagagcaattttcaactttgccctaactcaagtaccctcatgggactgtcttgcaacacatgttctattgagaaaagaggtttcaaaccaaagggtgggtgactgcaataaatatgacatgagatgaacaaggcttgggagtttccatttatttattctaacatttgcccttctcactagacactcaactccatgagggtagagaatgtccatactgttccactcgcccctggcacctagtagtgactcaataaatatatgttagaaggatggattatccatgattta

SEQ ID NO: 1049 - DNA, 533 bp, Rattus norvegicus
  Genbank Accession No. AI101160
aaagaataactttgttttattatcatgatttcagaaaaaacaaacaaagaaacgaacaaacaaagaacaggacagacagttcaagaaaggacacagtcagtgtcccgttttaagttccaaatttcttctttttgatgggtggtgggagctgagcaatgatgtcatccagaggtcgttctactgccacaagtgtcctttcatccaaaagatccataaagagtaagggcttatatatcttagacattttaaatccatgggtcgtgcgcctcaggaagacatctgattcgtttttcggaggaagcggattatagagcacagttttgtcatttggaagtggcaaggacttgtcaatgatgcagaacatgtaggcgtcatggaggaggatgtgcatgggtctcttgggatggatgctgatgtgtgtgatgggagtatccctttggagccacagctggtgaaatccttgcttttggacagagcggttccactctgtatactgcttgtctgggatgctgaactcaaatacctgctggtca

SEQ ID NO: 1050 - DNA, 405 bp, Rattus norvegicus
  Genbank Accession No. AI102562
ggcttttattattcacatgctcggtagaaaacggggtttagtaaactgggtggaggtgtacggcaagactctgagttggtccggaaattatttacacctgagggcagcagcactgttcgtcacttcaggcacagcacgtgcacttgtccgaggcacctttgcaaacacagccctgggcacatttggagcagcccacggggcagcaggagcagcagctcttcttgcaggaggtgcatttgcagtttttgcagccgcaggagctggaccaggtgcaggagccgccggtggagcaggaccagttggggtccattccgagatctggtgaatctggagcaacggggtaagctacaagaaggcagtccctcgtgccgaattcttggcctctagggccaaattccctatagg

SEQ ID NO: 1051 - DNA, 434 bp, Rattus norvegicus
  Genbank Accession No. AI030339
tttttttttttttttttaagatagctcttggctttatttacaagttcatcctcatgtttccatgggggtgagaaactgtcaaccaacagttcccaaagagggtttcagctgagattcacgtacaaaccactacatgaagggaacaatggggaacccaaacacccaaaccaaacctacccacccgcagccgactggcacgaaactgctgctctcccaccaggtaagctaagttctacttcgagatcaactcattttgcaagaaagcacaagtgacatggtgcactgggcagggtgatacatggacgtctccagccgagaccccacgtgtgtgggcgctgtgtggagacagccaggaccaggacacatggtaagtgtttcagaacttttctagcttcccaagatgaaaacaacagcacaacttcctacgtgaagtc

SEQ ID NO: 1052 - DNA, 454 bp, Rattus norvegicus
  Genbank Accession No. AA891721
accaatcaactgtttattaaatgttacagaaagggtgaacaaattaatgaaaatatggaattgaaaggcagggatgaaggaacagggagcacagcaatatccagtgggtttagatggcccttaaagggcagacctgcatgctagagaagcataatgggtccctgtttagggtacctctgtgtagactcggagcctgaaggccaggatgctgaagaggcaggtattacaacaggcccaactgcacaggctgttaactgaaatctgaggccgtctctcagataggtactccctttgactcttaacggctcttctaggccgcactcttaacccaccagatgtctgcttccttctttagggtccaaaaatagtttttactttatagattgtttaaggatagatactatgcctgtctcaaacactaccatgtccctactgcttagcacatacagtgcct

SEQ ID NO: 1053 - DNA, 647 bp, Rattus norvegicus
  Genbank Accession No. AI172056
gggggggaaaaggtttattttttcctcagaagaaacagactggggaacatttacaacccacattaacttgcagttggtcctaaccctttcgggaacaggtgttaaaatgttaggtgctctacggaatgaaggtgttcaccccagacagaatgtacatggacgatgcttgaagactgcatgttttttccctgagagacgtgtaagacaaacagaatttgctgagagccatctttccaaacaggaagcataacaagccaacatgtaaaggaaggagaagccaaggttaattcaataagacaggtgagacacctagaaagaccaatacaaaaattccaaacaaagcttggcagtcattagtagaaaagaaatacatatttgttttattgacaccaggcttaaacttgtgttaaacaagtaaagcctgtgaatagcaccgtggtaaagattagtctgctttcccaaagcattttacaatttagtaagtcaacaggggatcaaatgtcttacatctacctgtgatccttaaatacagaaacagattggataattaaccctgcatagttataactcggatttgttctactacaaccagtccacacacacaactggctctgcatatacactagaactgatcatgacaaagtttt

SEQ ID NO: 1054 - DNA, 1049 bp, Rattus norvegicus
  Genbank Accession No. D85435
gccttcggttttagggagagcaggccgggcggtcagagatcatgggggagagcgcactggagcccgggcctgtgcccggggcgccggctgggggtccggtgcacgccgtcaccgtggtgactttgctggagaagctggccaccatgctagaggcgctgcgggagaggcaggggggcctggctgagaggcagggcggcctggcgggctcggtgcgccgcatccagagtggcctgggcgcgctgagtcgcagccacgacaccaccagcaacacactggcgcagctgctggccaaggcggagcgcgtgggctcccacgccgacgcagcccaggagcgggcagtgcaccgcgccgctcaggtgcagcgactggaggccaaccacgggttgctggtggcgcgcgggaagctgcacgtcctgctcttcaaggaggagactgaaattccagcccgcgccttccagaaagcaccagagctcttgggcccggaggaccagttggtgctaggcccagagcagccagaggatgaagttggagagagttctgatgaggaacccgtggagtcccgggctcagcggctgcgacgcactggcttacagaaggttcaaagcctgaaaagggctttttccagtcgtaaaggctctgaagcagcacagcccacgccagtcaagccgccacgcctaggtcctgtccggaactccgaaggcccggcagaaggccagcctgcagctcagcctgcaatggagcctgtgctcccgtctgccctggagccagaacctcctcagcctaccaaggaagatcctgagagacctgtgcttcaaatagagagcgcagcctgatccctggggctgcctgccccattcagcccttatgccttgtcccaaaaataaatactaatcgagtgcagcacttacatccaaataaggagagaatcctgcatccactgcccggctccaatccttccttcctggttttccagtctggtaccctgtgtcctctgaaagaggaacattcggccttgtttaggttcaccaccaataaaagtaattttctct

SEQ ID NO: 1055 - DNA, 570 bp, Rattus norvegicus
  Genbank Accession No. AA944481
aagggatataagcttgcggccgcaatgttttttttttttttttttttttgttctgaggttgtttttattgtaagaatgttgtgagctgtgccttggaaccacagttggcacctgttcatccacagcacccacaagagcaccattgagtgtatccagggctcctgggaaccctatctccagtcggtcaatatgaccgagtccgccattaagggcccagctagttggactgaaatggtccctctgcatctccaacttctctggtaggcgagaagtgagagtcaatgccccttgagcccacgttttctgggtctgggccatttgtttcctgttgctctgactgtttcagacaacagtgcttgcagaccccaacacggaaaaggggtcctccagtcactccagttatgggcttcttctctgtccacgagactccagatagccctacttagagctcctgctctcagcagaaaacagccatatcttaaggtcacaaccaaagtcactgtcttcttaggcctggaaccaggctccagtgaggaggctaggaagctgctgtaacctccatgggctgga

SEQ ID NO: 1056 - DNA, 555 bp, Rattus norvegicus
  Genbank Accession No. AI071185
  misc_feature (1)..(555): n = a or c or g or t
tttttttttttttttttgttttaatttggactttattgaaacagcaaaaacataactaatgttttgtggattgttttttaaacaaaattgaaatgaaaaacatcacaaataaatgtcattaacatttctggtgagaaatccagtgacaggaaaacataaacaatactgagcaaagtcttctcccacctagactattcaagatactgcctggtcctgggttgggtttagccatgttttctaacaaaggcttctattctgtaaagagaagattggacagcttgtgtagaacattcatggttactattactatatgttctgtggccacatgcacttaacagccacacatgtgcacaaagtcatcattcctattaggcttagctaacaacaagaaaaaagaatacctttccaccttgttctgcaatgtgacaagcgttaagaagagggaaccaatgtatgtgttcagccattccatatagtcattcctttatggcactttccaggagttaattaaaggagcgccaagatctgcangaattcaagccttacctaaaaata

SEQ ID NO: 1057 - DNA, 618 bp, Rattus norvegicus
  Genbank Accession No. AA943564
  misc_feature (1)..(618): n = a or c or g or t
cctaggtcagctcccaccagtctgtctggtggcctgggtccaggccagagccatgacacacattagatgccaatgactctaaaggagttctgggacaggccagccagcatggctctagcacaatctaggtgaaaagtcttgtgaatggtggcacacacctgtgatcccggcacttgggacagtatggggatcaggaattcaaggtcagccttggttatataagcagtgtgaggtcactttgagtatatgatacattgcttcaagaaacaaaaattcaggactggagagatggctccttggntaagagcacttaggaggatctgcttttttcctagtacccacagcacttcagtaactaaagatccagggttccaacgctctcttgtgacctctgtgggcaccaggcacacacatggcacacatacacacatgagggcaaaacggaaaatacataagtctagacaacttcactctgtcgggggataaagctcccctccctcgggccagggctagctccctctatgcagccatccggaaacaccacacggcaaccagagttaaggagatgcttcctttggtataaatatattatatacatccaaaacatgacattaanat

SEQ ID NO: 1058 - DNA, 502 bp, Rattus norvegicus
  Genbank Accession No. AA999042
tttttttttttttttttgtgttatagatttatttgatatctgaactgagtctacaagtcagacccatgagtaacggattgcttcgtggttgtcagaggctagtgtgcagtatttccaagggttacatccaacgacatgacgcggaaaacacaaattgacggagacagacacaatcattaagacaagagacgctaaacgtgccttagtgtccgtgggattgatctaaggcaaggacccttctaggtggggaccctagtgactgatctaaagcagagtggcttaccaccactagatgctaactgtactgtgtgcaaaccaggcgcccagtaacaactgtcctggaaccccaaaactggggagcctgccctcccagtggtgacctctcatgcccaatctacctctaaatgtcagctcttcacgatggaccagatggtgacagagctaatgtaagcagaagacgcgagaggtggtattgagcaaatccttgatgtggggacagagt

SEQ ID NO: 1059 - DNA, 581 bp, Rattus norvegicus
  Genbank Accession No. AI229643
  misc_feature (1)..(581): n = a or c or g or t
aaataacacacaaaaatcttgttttatttttgacacgacactgtctaagatggaggaaaacacttactcacactttgagaatacgtgtgctctctcgtccagaggtggaggcctcgggcctcctggtattcttgaggagggaacagcctgtgctccacaacctccccggcccccatctgtctgggaggctctgaggagggacacctctctcacagctgtaatggcagccctggaaacccctcacacagcctcaggccatttccaacccattaggcatcttaaacagcttgcacactttacaaattatttatggcttatgagtcaattcagtgtacaatgacaaatctcagggattgatgtctcattggcagttaacagttcaagggagggaagtatttctggcattcttaatctcaaaaatataaaagaataatattcattatagtcatagaaaaagttggagacagttctatttaaaaacatatttaccataaacacaaggaaaacaaataagaaaatagattgtgctgtgactttgtaagactgtcccctttcaaaatgctttanggtcaggaagattt

SEQ ID NO: 1060 - DNA, 349 bp, Rattus norvegicus
  Genbank Accession No. AI058357
  misc_feature (1)..(349): n = a or c or g or t
tttttttttttttttttaaatcaacaagaagcacaatacacatttaatggaacattgttaaatttttgaccccaggcactgatttcctactggcaccttcagaaaccctttaggatacattaagtgctacggaacatattgtatcccgagatgaaagcgacagtcttccagtagaagaaatgacatctccagttgagaaacacacaactgctactttacaaatgagatgaagggaggtggacgattcgaagtagccacaaaagtaataaaggcaagggctagaaggatggcggcaccagagttaagatcatgcaccgttcttgcagaaganccaaattctgttccctgg

SEQ ID NO: 1061 - DNA, 519 bp, Rattus norvegicus
  Genbank Accession No. AA899197
  misc_feature (1)..(519): n = a or c or g or t
tttttttttttttttaaggaatttttattaaagcaagaattttataatccaaattacgtttccttgctcagtcatcagctgctccatagaacagaactgacgtcccaagctattccacagtaaagaattacaaaattaaagaaaggaatgctttaaatttttgtactttgctgaaaattcttttcccagggtctataaaacattaatttgtttttatattttactatttttttgtatttttttttgttgttttaaatcaagtaatctaggactagcactgtttgctagacctggcatttgctcggtacataaggttcaaagtttcctttcctttttttatttattttatattttgcaatgtttttttcataatatttaaatttttcgatgtttaagatatttttcttcggtgaagcacgagtttctgttcgtggtccctgatcaatttagacagttggnacaccagtggcactgttcactgctttctgggcagcctctttcgcttggtgggcttgcctc

SEQ ID NO: 1062 - DNA, 364 bp, Rattus norvegicus
  Genbank Accession No. AI060260
tttttttttttttttttcctcacagagtgctgcacgttgatggagtcatgatcttgttgctcagtgaggatcaccaccggcgtcttacagactgtggaggcagcagcatgcccccgacttcccagggcaacgtctctgaccctgagatgaagatgcttttgaatcctgacagaactggtgccccagacacagcatcaccttcacagaaagcaagcagcttgcaaagtctgggcaggccattgccctgtggctcattggtgccagtggagtccttcaaagtcagccttggcaaaacagatgctttcatatgtaagtataagaaggcatccgcttcgggactgtccccatcccgatgccatgagcc

SEQ ID NO: 1063 - DNA, 649 bp, Rattus norvegicus
  Genbank Accession No. AI175033
cattggcattaaaagtgtttattgggaatatcatccaatctatacaagttatatacaaggcatgaaaatggcaaacagcacaaaatacgattgaggtataagctaagagcacagtatgtcatgtttcaataaatataatccaaaatttgtaaactaagtaaccagatagatgagtcattttttctagtaaaaccatataaaatatttatttcatgtgaggtagaggacagttttgtgtgtcgtgtaatgcaaccaaccacagcaattttaatcataaaactatatgcactggcaaaattatcaatcgagttatgctcaatgtacctaatgtgtttccgtagttgcagaagggaccattcacatactgccttcccaggttagaaactgcggggtaattgaactattacactgccttaaaattactacgggaagtccttccagcagaaaagctaatggtgactacatgtatcacaaactcacaactcaaaaggtgtcctagatttagcaattattctaatggggtgttctcatgagaattactttaatgtgctgtgctttctttattttcaagtgaggtatcttatattgaagaaaaaatcttataaatttcttttatactaaactaactttaaacactatttcggtttct

SEQ ID NO: 1064 - DNA, 628 bp, Rattus norvegicus
  Genbank Accession No. AA801116
gatgccatgatacactacagcagtagtattagtaatagcgtgttggaggttctccttcatattagtgtccctacgcgtcctttacggttcccacagataacttttagaagtaaagtacttctgtagagaagggccagattttctttggggtttctaaggaacatagtgcttcaacttgtttcatgaagtccatagccagaagaatttcagcccgtactggcaaacagataggctattgcttttcacgggtctcctgggagagcttgaaacttggggcaaaaacactgattttttcacagatcttcccaggtctctcttaggaaagactcaaaaaaacacattgccctctttgctgtgcctgaaacccacccccattgtgtcgagtccttgcagagaaacctgtagatgtggttcataggtatatgagtaagcatctgtgtaaaagcagtgagtgtgtgctatgtaaatacgttaaattattatgctagaaaaataaagttacggaccatgctgccccatgtctgctctgtgattacagtgacccctgttggacgagctgaggaacctctggcaggaggagggaaggacttaatacctaatcagttttcatgagttgtacttgcccact

SEQ ID NO: 1065 - DNA, 649 bp, Rattus norvegicus
  Genbank Accession No. AI009608
acaaaccaagaatatagcattttattcattttcagattatgtgtattacacaacatatacatatatttagataatatataaaagaaataaactatacgaagaaatattggtctgaatctgccttgtaggacgtctttaattcttccgtttgttgagtgtgtctctcacatgccagggcaggcagcacaggaaaccccagcacgtgtgtgtcactcaaagctctgcttttctccactgaacttagaatgcaaggaacacaactgtggcatggtcactggtgtccacgacaaggacacagtagtcagtgagccatagctcagtggattgtttaaatattttagcttcctttttaaacgaagactcagcgtccagagtctgtcccctcagctgctgtccagttattgtttggccttgttctgaactggtagatatagtttgaactctgctggcagctcatcctctgagtagagtctgtctgagaagtaaacccttcggatacgacagtttgcatggatctgcactctcagggtctcgatgtagtttgtaccatatgcccgccgggtgaagtcagataggttgaactgaatctggtttcagccatcatccagccgcatgggcatggtacagatgaagggcttgactcgagtgg

SEQ ID NO: 1066 - DNA, 516 bp, Rattus norvegicus
  Genbank Accession No. AI012958
cagaattgggaacattttatttggaaagatttttttaaacatgatttatcttcatttttccattaaggcaacaataatatccttacttcgtggaggcagatgggcaaacatcatctgaggctacatgatgttcagactaaagtcacagccaaacactttgcattcggatgcagcgggaatactggttgggagctggaaagagccatctattggtttcctgagcccactgtcaggggatgaagttgagatcctgcatttccactgctttggaagacaacgaagttccattagtgggagtaagactttcactaatgcaaagggagtctacctttggttcacaatgctctgtggagttttagcttttggtaagttttcgtggaaattgcttatctagtgggagctattcaaattcatgctgtcccttttcggttttgaattccaggcagttcctagtcaacatggtactcttggcatccagctacatatgcgtatgtgcccgtgcaagcatttgggtga

SEQ ID NO: 1067 - DNA, 1758 bp, Rattus norvegicus
  Genbank Accession No. X96437
gaatagcgtctcgggagtgtccctgggtaatcgctgcatctcgttttgtgtgtgtgctctgtcgaaacgtctgtgatgtgtgtatggttttcacgtgaacggaggcaggcagagttgggtctgtgggttctagtgtgttcttaatctttttggaagtttgtgcagtgacttcccctctgggattgtttcctatgcataccttcaagtatgtgtgaatgtgttttctgtggtcccttgatcttactgggcttctctaaggagggtggctggaccatctgctacgtgtctgggagcccctctctagctaccacatgtcccgacatgtgcttactcccaatatttgcacccactcgcattcacaactcccaggcaaaaagaaaaaatcaaaaaaacaaaaaaaacgtgcactggggcacctagaaaatgggcagccaaggctccgcctacattttgcttcctccttggaatttccagccctgtgcagccaactgctccctagctgcgaagggcggagtttcccggctctataagtagtggtgccttaccggggatccgcactcctccgtaccctctgtacagcgcgcgaattatgtgccattcgcgtaaccacctccacaccatgactggcctgagggctccggcgccagttccctccaccggcccggaactccggcggggctccggtcccggaattttcaccttcgaccccctcccggagcgggcggtagcgtccgccgtgcgtccgaacacttctcgcgggcacggaaaacgcagccgacgggtgctctaccctcgagtggtgagtatcgcccgagtgggcagcaagaggtcgagtcgccccggaacctttgggaacaactagatgcggggactttcgtctgacgtttccctcttttctctgctcaggtccggcgccagctaccaaccgaggaacccaacattgccaagaggatcctctttctcctgctcgccatcatcttctgccagattttgatggctgaagaaggtgtgtcgcaggccctggctccggaggatgctaccagcgccatatcacctgagcccatctctgcgcccattactgcgcctcctgtcctcgagcctttgaacctgacctcggagtcctcggactatgctctggatctcaaagcttttctccagcaacacccggcggcattctaaacgcgatgggtcacagtccggaaaaaaaaacccaaagagcaccaggggtacctggtcggcaagaacgtatcccaaactgggacttataaggcaacgctaactcagaacactaccgccaagatgccggttcttggggcgagcccgaggcaccgtgggtcctggctaggctcactggtgacggacggaggtcttctccgtgtctaattaatatttatgtatttatgtatatcctcctaggtgaaggaggggtgtatgtaatatttattctaacttatgcaggggtgcgagatatgcccccttgctgtgacacagatatttattacgatttatagggtccgtgagacagagttgtgggaggattagtttagtcttggtcggggggcataggtttaggggtaacactccattttccagcacttcgactctgttgtaagactttggcagacccttgggaatacggtctgtgtgcctttgatgtcttcctgactggaagtcttgggtccatggattgtcagagggcggctgtctggggtcgcctagtatgttctgtgaacacgaataaacttgatttgcctgtcg

SEQ ID NO: 1068 - DNA, 593 bp, Rattus norvegicus
  Genbank Accession No. AA892863
gcattttcctagatcatttttacttgaccttttttttgggacaaaagagtaggtaatgcaaaacatgttttatattaaaacagatgcagatagtattgaatagaatataaaatttacattacttttgagacaaagtacttttgacatcaaagacatttcaaactaagctacttatgagcttctgggtgcatccctccctaaccctgagcagaagaccctgctcgctcacactacctaacatcatggcctctgctgcattgacagaagtctaaaagcagcaaagtcagtgcttactcatttggcaaagtaccagtgaatttacttaaacaattgacaccttagggctttctcatcttacgagcattttaacctgacgttaaaaggcctgagtgaatagaatctcaatgcctgagttgagaattttcattgtaaagtgaattttcctccagtaagtgtttttaacaagcctcactgagggtctgacatgcgagctggacaatatcctaggaacctggtcaccagataaggaggtacagatacacttttcaagggcatcatcacaaatgagaacaaactactcaccttctgcagta

SEQ ID NO: 1069 - DNA, 375 bp, Rattus norvegicus
  Genbank Accession No. AI059499
tttttttttttttttttagttaatcagatggccagaacagtaacacgtttattgtaccacccagcagagaacaaacacaaaatactttaagaaaagtaagaaaacattgggcaagttctactctacaaacacaactcttcaccatgacaaagttcctcagtcattttggtcatcatcccagtctttcttcccacttggaggcttgggcccaccagctggttttgccatgatgatctgatccactctaagtacagtgactgcagcattagtggccagtttaatagcccagtattttcccaagtaagtatctaaaatactggcttctaacatatcctttacagcaggaacttcagcctcaatatcaacctcgtgccg

SEQ ID NO: 1070 - DNA, 660 bp, Rattus norvegicus
  Genbank Accession No. E00898
atatctaagtcaatattaggcatggaaatcttgggggccttcgaatgttatctcaggcatcttgaacttggggcccttcagttttgcatctgggtcctgacacatcaaggttcagccttgggtgggttcacatccacctcagggccctctgctttgaagccaagcatactgaacttgggcatcttcatcttgggcatcttcaggtgccagtctgggccctgcacattcacattcggaacatcaatgttcactttggggcctttgatgtcaacttcggaactttaatctcaccttccactttgggaagagacacgtccacatcacccttcactttggggcctttcagattcagatcaaagtcaggcatggagatctttgggggccttgatgttcatctcaggcatcttgaacttggggccttttagttttgcatccggacctccaatattcacatccggaacatcaatgtccaccctgggtcctgacacatcaaggtcagccttgggcaggctcatatccacctctgggccctctgctttgaagccaggcatactgaacttgggcatcttcatcttgggcatctccaggtgccagtctgggccctgcacatccacatctggagcattgatgaccactttggggcctttgatgtcaacttca

SEQ ID NO: 1071 - DNA, 486 bp, Rattus norvegicus
  Genbank Accession No. AI101851
cggctgtagacatttattgatttgtctgttgcaccaacaacacactgtatgtacgtcacagaaaacagaagaaacagaagaaaccacagacatctgcttgggggccttctttggtccttagtcatgtatcatacactttggcaaaaagcctagtttacagactctcgttggagacctaaattctaattctctgtgtagcctggcaagggagactcccaatggcactcattagttggtctaaggacgagtctcccaaatgtaaacatttgactgtacaagtgtgccaacgaatgacaggtcttctaagatcccctatccttacaacatatacaagtggaactggagacaaacctcaccatctcagggtgttaggtagcctcaggcagaggggctacaccacagctgggagaagagacattaccagaagcaggacctaaagcacagttattagaaatctgactgaaaaggccaacctattgacctaaa

SEQ ID NO: 1072 - DNA, 384 bp, Rattus norvegicus
  Genbank Accession No. AI030545
tttttttttttttttttaaattttgtacattttattttttttttttttgggtttttgaagcaggagcttgcctgaaactcaatgtgtagtcgaggagactctttctcctgcctcaactaccaagtgctagaattacagatttagtacagaccaactgaacatatacaatgttatcttgttttaataaagaagtcgggcattgtggcacatccctataattcccaggacttaggagagagcactatggtcaggagttcaaaaccagcctcaactacatagcaagttcaaggccagtcccaactacatgagactgaccatctaaaacacaagaactgggatggtagtgtgcatataatcccaacactaaagaggctgtcactggaa

SEQ ID NO: 1073 - DNA, 442 bp, Rattus norvegicus
  Genbank Accession No. AI010593
acagaaaagctatctgatatttattaaacttagtttctccagctatggtttggcattatacaaagcatcataatgacacagtagagttaaaaagagttttacaaattgaaatgtgatacccttgtctccaaatattttaattgccataaatttgtttaaaaatacacattaaacgcatgtttgacactctaaactctctataatctcgataccacaaaatacatataatatactatacagatgtggaaaatctagttagtatgtaatactttgctcaccattaacagctcgttatgtgaatgcacatactgacttagaaaccctagcttttgagccccaaagtacctctgaaatttaacatattgcaacaaataaaaatcacagtatacaattgaaattttggttcaaagtgtcagatgcctagatattttggataaaagaa

SEQ ID NO: 1074 - DNA, 461 bp, Rattus norvegicus
  Genbank Accession No. AI010917
ccatagtgccatgtctaagacttttaacaataatactttagcaatactgactaagtactttgagtacatttaacaaattgttcttgtatcaaacacttttcattccttcacatttgtcacttctcttaagcctcagagtaatactataaaatacattttataagcatccattttgctatttattttctcaaagtcacaatcagcagtgataaccaggacatgaatcaggaagttagattgacagccaatgtcttacctgctctgtcttgctgctgccatgtagccagcaatacatttttaaaaattatagtatatatatgtgtgtgtgtgtgtgtgtgtgtgtgtctgtctgtctgtctgtctgtgtatgcacagatgagcctatgacacctttccctctctctctctctctccctctctctctctctctctgtctctctctctccctcttcctctccctc

SEQ ID NO: 1075 - DNA, 623 bp, Rattus norvegicus
  Genbank Accession No. AI169756
aacggtgtcataaataagtaatataactttattaaaatgaaaagacaatattcaaaataatgcaacaaaatgaacaaatcctttgtccaatactgtacacacagtgcggagatcagtgcattttctaaagcatgttttaaccttcatttagttcatactaaaaataagctttaaatagctcaaataatgtcattcagcagtttaaactgaacagcttgttgggacatggcagcggtgtccctctgttagcaagcaccttctctttgtgcttatctatacaagataaacaatcagaggatgtaaaaattgaacacaagctacacgtctcactgactctcagggcagtgaggcagccagctgtgagttttctaagcaggaagatgctgaagtgacctctggcattaagacgttctgtgctattggtcagaagtgtttcacttaaaaagcaaacaatccccaggaaatactgaataggaaccaacaacacaagaccagcttgtgttgtaatttaaagtctcaaaaacaaaacaacatcccatacaccccacgataactctcaatcatggctaatcactgggctggtctataaaacttatacccaacactgacggccagcaccactc

SEQ ID NO: 1076 - DNA, 289 bp, Rattus norvegicus
  Genbank Accession No. AI101099
  misc_feature (1)..(289): n = a or c or g or t
acaccattgtgaggacgcccccacttcaggcgcagcagctgcacttgtccgaagcctctttgcagatgcagccctgggagcacttcgcacagcccacggggcagcaggaacagcagcctgggggaaaaaagttgagcgtgagcgagaaaccgagttagaggcaccctggacgctctgggaaggtgcggcgggctagggaccgcaggggcgcgaagggaaagggtagagaaaataaatccaactcacttttcttgcaggaggtgcatntgcattgtttgcatttgcagga

SEQ ID NO: 1077 - DNA, 522 bp, Rattus norvegicus
  Genbank Accession No. AA964613
tttttttttttttttttaaacatgtaaaaattaaaagtttaattcaaaaagaaataaaactatttacttacaaaccacttacacgttctttcccctgatgcacattttaaaagtacaaatagaatatgaggatcaatataaagttgtttcacaacagagaaccaaagcactcattcaaaaagaaaactattacaggatacaatgaattacctctgtgcatatgtttattaatgcaaagctgtgctttactcttttttcctactgagaacttatttacaaggatgattgacaagacaaaatacatttaacatttggtagtgataaacagtaataaatgtaatagtggtacttcctatttctttatgtctctctcttcaccacatattatcattaatgaggcatccatatggacttcaggcttttctcctgcaaaaaggcttgaccattgggaccattaccatgaactttcccaaagagtcatctttattctatggaggagtttgttacagtaattttaacagt

SEQ ID NO: 1078 - DNA, 282 bp, Rattus norvegicus
  Genbank Accession No. AA893307
gacacttgttacagaaggtaaaattctcacttttgagtcatagattattgaaacctgacttagattttattgcaaaagaatgtatgataaacagttcaagctatagtataaaaggctttattttgaaactcaagcatctcctcattgagagtctgcaaaagggcttcctcagcgttacagtcgttacaaccttgaaaaactagtgagacttagaagacgtaacaaataacatgaaaagatttgcttctcttgtattaaaaatgtttctcatgtataatacaa

SEQ ID NO: 1079 - DNA, 306 bp, Rattus norvegicus
  Genbank Accession No. AI177280
cacagtagagacagcatttatgtcagagatggaggatgggagccaggcaggacctgcccatcagggccacaggggcgggtattcctgtccgtgatgtcaattggtcccagcggaggcgggattccctgtgagagctgtcaatcattgtgggatggtgagatttcctgtctgacataactgagccaacgacgtcacggggagcggtgggcgtggtctagggccgcagcaggtccttcctcagcgtctccgagttgacacgctcgtcatcagatacgcggtcccggatcccggggatgggggggagga

SEQ ID NO: 1080 - DNA, 369 bp, Rattus norvegicus
  Genbank Accession No. AA926089
tttttttttttttttttaccacttaggacattttattggcatatgacaatttacaagggtccctgttgaaatatacaccacactgaggaagaatcgtttagccatctacattcattctcattggatattttcccctcaaattataatttaattcccaacactgattttaactgtgacgaaagggaacaataacaattctttgaaatagagtgcaactgggaaagactttgctttttatattaaaattcctaagatgttgaagcatacaaacctaagaattgagtcatggccttctaaaaactgttttcttattttttttttctggaaaaatcctttggttcctttttatttcctttctccgggtaaagg

SEQ ID NO: 1081 - DNA, 708 bp, Rattus norvegicus
  Genbank Accession No. AA799612
  misc_feature (1)..(708): n = a or c or g or t
caagaggttcaacagaatttacttgtatattttccattttctatactacttgaaggcataggatagcttcatcttagctttctacaatactgtgttttaagtctacccagtaaactaagaggcagtacaacttgaatacaactgaggaggtgagaagcaactcggcaggccctggtgctcaacagttccggaataaacaggtagcgcgcagccgcattaaaaggtagtttgcaaatattcaagttacaccgagattccttccaaacctctgccttgctcaaaccagcgcacctggccactgctaacaccgcggcacggcatttggtgaatggtgatggttttactttcttcttaatcaaaagcctgtggaggtgctgccacgcagcagagtaagtcagctctgctcgaggacgaggtgccaattgtgaagtcacaaaaggtacagtttacatgagaaacgcacattaacaagtggcccaaatacagagctggacagaaccagaccagtaagtctatagttactcaactgaactaacataagtacattcaaaataaagccggagatcagaataggttttagaatcaaatttgcagactttcttgataaaacagaagagtgaccttctgcagttggaaatgaggctctcacctggcgaanagcanagacttggcagtccctcctgcacaggtaaggaaataagtgacaaa

SEQ ID NO: 1082 - DNA, 344 bp, Rattus norvegicus
  Genbank Accession No. AI112310
tttttttttttttttttcttttatcataaacaaaatcaattttatttagtaaagctctttccacatttccaaggcaaacgtctacacacagtgatgaccaaaagtgcatgcataagctcgtcaccagcgcctccgaaaacctttcttcttccgacctttcttaggcatcttcttccgctttttaacaggattctggtcctcatcaagatgagcggtgccccctgtcaaagcgctgatgtcgctgaagtgtgtgagggaatgaagctgtgagctcatggcactcgcccgccttcgcagtcctttctctcgcttgctgacacttaagcgaaacatcatgctctctt

SEQ ID NO: 1083 - DNA, 512 bp, Rattus norvegicus
  Genbank Accession No. AA892582
  misc_feature (1)..(512): n = a or c or g or t
attagccaaagcacatactttattagctcctgaactctagttctccttctcctgtacagttttggttccacgtagccgtccagtccggcgagcagcaatgagacccactttgcgcccagctggggcatctcttcggatagtggaaggcttgccaatgtgctggtggttaccaccgccaaagggatgctccacaggattcatggcaacaccccgcacacgtggccagcagttcctctttgccttgtacttatggtaggcacggccagcctttaagataggcttgtcaattctgcccccgccagccacgacaccaacaacagctcggttagcagaggaaatgaccttcttggaccctgaaggcagcttcactcgggtcttcttggtctctgggttgtgggagatgactgtagcatagttcccggaggctcgtgccagcttgcccctgtcnccaggcttctcctccagacaacacacgatagtaccctcaggcatggtgcccacgggcaaaacat

SEQ ID NO: 1084 - DNA, 564 bp, Rattus norvegicus
  Genbank Accession No. AA818421
tttttttttttttttttgaaaaaaatgtatcattttatttgcacacttagaaaagttgtacacagaaacttattgtttgtaaaacagaactgttaggatgacatttttatttttaaatcattaagactggttgagaaatagaacaaaaacatagtaaaatgtttaaaaaattaaagaacattttccaagtataaattttataaatacaaaacaaattcacaaatgactttgaatgctaaataaatatctagttaataaattcagttggtactggctacagcacatcagagctagcgaactggactcactcatgtgtagtgttgaaaccctatgacatggagctcagacacactctctatggtgtgttctagcaggctcaccgtggagacaagacctccttactactggaactcctaaggctcaatgacaaaatagagcatagatgaaaaatattttccaagacacctgaacacatgaatgatctcaaaatatacacaagcctctgtaacccagtactgtacccagtacgtctatgcaacttagtagacactgaacaaaagctgt

SEQ ID NO: 1085 - DNA, 531 bp, Rattus norvegicus
  Genbank Accession No. AI102618
gggggggaaaaggtttattttttcctcagaagaaacagactggggaacatttacaacccacattaacttgcagttggtcctaaccctttcgggaacaggtgttaaaatgttaggtgctctacggaatgaaggtgttcaccccagacagaatgtacatggacgatgcttgaagactgcatgttttttccctgagagacgtgtaagacaaacagaatttgctgagagccatctttccaaacagcccctccctcttcacactttggaggatgtgcctcaactattcatctagtcagcactcagaccacatgctgctttccttctaaatcaatccctttcccaaccatttgaactctccaagtcttcatagccctggaccgaaaatacctactaagatcctatctgtacttcagctttcacaccttgtgagctgggaagtcaggctcctagtaaacaaaacttccataactggattatgaggccaaccttttagttaccttaacctatagggtttattcaactacataaagtgct

SEQ ID NO: 1086 - DNA, 466 bp, Rattus norvegicus
  Genbank Accession No. AI070590
  misc_feature (1)..(466): n = a or c or g or t
tttttttttttttttttgggtaaaaatgaatataaattttattgaaaaagaactccagcaacagcatcctcgacagccagcggcccacacaattcagcacacatgtcaggagaaatagtcacctctgtcggtttacttcacacaaaaggaaacttcagacctcagataaactgcctctgacatcccacagtagtgagctatgcggtcacagccttaacctggtgtttactgccggccaaccagtacggttcaagaattagcggagggagaacccaaccacttcagtaaatatggcaaagaaaaggccggaccactggggtaacttttctccttttcaagtcctttgagaatttctcagagtttattggcaacgcgtcnctcctacttcacaacaggaaatggttcttatatctagctcaaatccttcatgcttcagttaatctatttatgtctctctaatctccgt

SEQ ID NO: 1087 - DNA, 506 bp, Rattus norvegicus
  Genbank Accession No. AI172326
cggttttgtgcacatatctttattggctctgccatccagctgggtgctagaggtccagggctacattctaaccgagtgccagcccaggccgcctgtccagacacctgatgtgtctggcagtgtggagggtggggcttgacactggaacagaaggtgcagtctttgaacagcactgactttcaaagcttgctgctcttgagaaagatctgtgtcctttatctgcaaacaaaggttaattgtacccagctctcaaagtctacagatgttaaattaggtaaagttggaagggtgcccagtacagtaggactaattgtgtccatgaagagggaaggtccctgctgagctgttcacctgtcttcaggtgtgggcacttgaaggtgctttggttctggggcagtgactagccagcgctcactgttggttgggaatgaaatgaaggtgcattacacggtgactcgactcaacgccttcattgctttcaaaggtcccattcaaatcctcgtgcc

SEQ ID NO: 1088 - DNA, 528 bp, Rattus norvegicus
  Genbank Accession No. AI176265
ctaagacaacatgagtttattaatgttcatttaaaactatgcatgagtttgtcagtatgtggattgggttcattccacctcagagatgacaaatgactgtccaaaaaatacactaacttaaacaacatgatcaacataaacaacataatcaatccaatccaaagggcatcttttaaaaaagaacatgagtacttagttctaaaaggtaagttagtccattaaaaggcatcatttttaatgggtcatatttgtcacaaagaatcattgtataatccaagctaaatatatccttgccaggcatatcaaatttaagcaaaatgtcaaaagaactaacattgcactaaaaagtaaaacatcttcatgaattgtataaacatcacagcacattattactatttgacaacagaaaacgacgcttcaatgttgaacttttataatttctagtaaggagaaacagaaacttcaacaacttatgtaaatcatataaatctaacaggtgattcattaaaaaaaagcctccctcgtgcc

SEQ ID NO: 1089 - DNA, 428 bp, Rattus norvegicus
  Genbank Accession No. U21719
caccctaacctaaaccttttgaattttgaattaatgggtaccctatagaaaaaatgacctgcggaaaaccaaacagtgaagggaaagaaggaaagaattccaattgacacaatttaaataaaatatggcttttcaaataaaggaagagaagtttcttttgggcacacaatctaaacaatatttatgtataattcagctcttatttggcttaaatgggcttagtgggaaatgttatcatttttactattttctacagagaaaatattttccagtttatcaagtaactctggactttggaattacctgtttttatgttccagctgtctatatagttgtttctctgaaattgtacataaaatgtttttacattaaaatgaattactgtataaagtactgcattatgcataataaagatactaatgctttat

SEQ ID NO: 1090 - DNA, 409 bp, Rattus norvegicus
  Genbank Accession No. AA998207
tttttttttttttttttaaattggaattctttaatggtttcctaagcaacagtggtcagacagagtaagttttcttatgaaaaaaatgctaaaacttcttttgaacaaaggaatattcaaccttaagaaaaaccttaaaagactttattactggtactttccaattgaacactagcagcccaagccttctaccttaagttgaactcttaaaaaaataagttttaaaacactctatgctaatatatttacagtttatatagaaattttcaataatcaaaatacatctttagcaaaaatttagaatgttaaatttttataaaataagcaagaccaatagaaaaggagaattcagtaccatttcagacttagcttaagacagaggttctcctaactcctggcaactctttgg

SEQ ID NO: 1091 - DNA, 555 bp, Rattus norvegicus
  Genbank Accession No. AI172299
aacagtagtttaacaaaatgtggcacatatgaagaaatatcatgcatccattaaaaaagatgtagaaatacatatgacacagtaagataggcatggcactgttgagtgaaaaagttacaaaacagcatgtataatttgatccccattaaaaaaaatctgtaagtgtacagagaatctggaggccacacctcagacagcacttcttagacgatggaactgtcgccatgtttttatttttacctctaaaatttttttgtcagtttattatgacttgtattaataaaaaagtattaataattcttaaaaagtctactgccgtagaagtgagcttagggactgaggtacagaggtgtacatacattagtctaatatggcctcactggcttctcagggtgtctcgaggctaaaccccaattcaaaggcactgtgtggaagtatggtggttagagctcatctttgtttaagctgcggttcttagccttcctggtgctgtggcctctaatccagttcctcatgttgtggtgaccccaaccataaaattattttcattgctac

SEQ ID NO: 1092 - DNA, 385 bp, Rattus norvegicus
  Genbank Accession No. AA819429
tgttttttatttttcttcccttcctaggtgtcccccaaccccatttttaatcaaaggaaaaaatttaaaaccagttcttctgattttaaaagccataatataatgcatttgtagttttttttggttaattatgtttttttaattggatattttttatttacatttcaaatgttattcccttttcccatttccaggccataagccccctatctcatccccctttcttctataagggtgttccccctccaaataatctccctcccccccaacattcacttgcactgggggtccagccttggcaggaccaagggcttttccttctattggtgcccaacaaggccatcctctgctatatatgcagctggagccaagagtcagtcacctt

SEQ ID NO: 1093 - DNA, 467 bp, Rattus norvegicus
  Genbank Accession No. AI179099
ggaccatttaaaagagaaatttattgcctcaatattctgggggcctggaagttcaacatgttagcaggttgctttctcctgaggcccctttccttgttgtagacggccatctttctctgtgttcacatggtcttcacttgattctcacctttgtcctgatttcttctgaggatagcagtcatatcagattaaagcccatgctaaggatgtcacttaggtatttatttcccaagacaccaagacagtcacgttctgaggttgtgggaactgggacttgaactgaagaactaaagctacaggatttgcctcttaagagaatggaaatgtatttattgagataatatacttaatagcccaaatgaacaaacttactgaaaattttaaccataaccgagtaagatgtataatagattcaaatgtcttataaatatatattatgatattttgaagtgccttttcctcgtacc

SEQ ID NO: 1094 - DNA, 8351 bp, Rattus norvegicus
  Genbank Accession No. M11794
gaattccatcagaatttgcctttctggtggcttctctttccctgcccttgtggtgtttttccttcagtgagtgacaaatttcacaaccctggctgggactcccgaggtgctaagattacaggcctgggtcacaccacccaaacctgactttctttttcattgttgcttgtatttttctgtttgtaaccaaagctggacgactggaactcactgtgtagactaggctggccttgaactcatagaactctacttgcctctgcctcctgagtgctctgattaacggcactgaccaatacatccaacctacctactttcattttctaaatctaagtcctaacaggaagtgggaactgggcaggaataacagtacggtgggttaactccatgagtttaccggactttgcgagcctcgactgccaacgacatcctggcttgaggctggaagtcacagcccaacaggggcaaagattgctctgtgaccagtctggaaagggagcactggagcacagaaatcaatccggttcaagttcatacccagggcaaccacggaaagtgccaggaaaggaaagaacaggatgttttccacacattccatgggcagccatggggatccaggagaaagtgatgcttggctgagccaagaagcagtgccccagtttacagtaagggctgagaggacagcctgtcctgagcttccggtaacacatttcctgccttctcaaatgacagacattccatctacgactttgagtctgatttcagcagtcttatgcaagaggggaaacaccatatgcctccagggaaagaaaatttggctgccgtctccaccctttccctcagcatccaccgtgggtgggggtggggagggttagtggggctttccatccctgtctttcagaacactacgatctggccctttctgcttggccaacacctgcgcagagtcctagttcatatcctcccagaatggcctgctctccacctccagcagagacccccatcattttttcctgttcactctctgccccccaccccccaccaagaataagtatccttagcacaaggcttgtgtctttatggtctctagtctctgacaactggctggagtctcagtggattcgaaccctccattcatcttgggctaatgactatgtgattgcgcctccgtttccacttttctactgtgaaaataatgaacaccccaagctatgttgtaaggaaaaatgagagccctaacagtgcccccagcacgtgacacgcagggggtacgtgacacgcagggggtacgtaaccaaggccggtaaagtctgggctagggctggtttttgttacctgttcacactgtcagctaggttttcctgtatgcggggtctccaagccccgctttcacctaagttagcactcaagacgtgctgtggggactgtgtccccgtggacgctgcagggggttcgatgtcccgcaactcctctgcacccggccacttgggcccagggcacgtgagcaggtttcctggaaccggtccccaccggatcgcagaccctttgcgctcagccctttgctctcagtccctgcgccaggagaaagggggtgtgactcagcgcgggggcgtgtgcaggctctgtacccacgtgcaaaaggagggatgcttgcagacttcgggtcgtgcgcaggctcccgggcgtgtgcgggccatttcccttgagccagaagaagggcgtgtgcaggcagtggggaggagggcaggtggcgccccgccacccgggcggagcttttgcgcgcgacccaatactctgggctataaaggtcgcgctccgcgtgcttctctccatcacgctcctagaactctacagcgatctctcgttgatctccaactgccgcctccattcgccatggaccccaactgctcctgtgccacaggtaaggggggctgctgacgggcctctgtaaccggagcttctgggagagcaggacggacttttgggcccctactctggtaactacttttagggtactactggctgctgccttccgaacgaattctggaacactcccgccccttttaaactagtccttgagataatggctcgcccaagctggctggcttgcacccgagttctttggagaactgtgttcagttatgcccgggtccgctcaccgcgctccctgccttcttcctctagatggatcctgctcctgcgctggctcctgcaaatgcaaacaatgcaaatgcacctcctgcaagaaaagtgagttggatttattttctctaccctttcccttcgcgcccctgcggtccctagcccgccgcaccttcccagagcgtccaggctgcctctaactcggtttctcgctcacgctcaacttttttcccccaggctgctgttcctgctgccccgtgggctgtgcgaagtgctcccagggctgcatctgcaaagaggcttcggacaagtgcagctgctgcgcctgaagtgggggcgtcctcacaatggtgtaaataaaacaacgtaaggaacctagcctttttttgtacaaccctgaccggttctccacacttttttctataaagcatgtaactgacaataaaataaaaaaacttgacttgattaacccagctttgtctgtgttcattggaaataaggggctggcagaggcgttgaaatgggattggtgcaccttgatttgggataagtggattgatgacccctctggactttgatagtctcgaacatggtgggcagaaacatgtactggtcacaaatgtgggcatgtgtatattggggattaaacccaaagcttcctgcttataaaccagggtgctctaatgagccacactcctacccctagatgcataatgattctggtttaattttggattattaggcttaaagcagtatgaagtacctgttcataagctttggtaaataaaataaaagttggagtgagtctcatacgactcctctttgtagtcccaatatttgggagcctgaggcagaaggatcggtgcaactccgaagccaacttggtctcaaattctgttaacctttgattttgagaccatcttactgtgtaacctaaaatggtccttgaacttgcagtcctgcctcagacttctaggtactgggattacaggctcagcttaaaatcagggctggagagatggctcagcggttaagagcacccgactgctcttccagaggtcatgagttcaattcccagcaaccacatggtgctcacaccatctgtaatgagatcttacgcgttctggcgtaatgcaagcagaaaagacatcagtaacgtgaacaaaaccatgaaaagtactgtaaacactataaatatccaagggtgtgccttgcagtttggagactaaatggcacatgtccaacctagagctcccatgaggaactgcccatctctggtatacagggacacggacaggattttttttttcctcttccagagagccctgtgataggacttggctgtcagtctggaagttcttctcaaggtcaggcagaaatctacctacccctcactccataccaacccctggcaatttaagcaaagtaactagaaatttggaaggaattgactagcatcttcccaggagctaggcatccaggttgagtctgcaatttggagggcggggtggagtttcctactctataggaaggaggtgaatacatgcaattaaaaccagccgttaatgccccctggctatttgttgaggtaatgcgatttggtcttcaatcaaagggaaagtttcttggctagaagtaaggaccaagcttgccgtaggctttctctgtgaagagtaaatttacaagacagcctctgtttcttgctgtcaggaagtcctagttcacagcccactttctctcttattggtcatgtagcctgggcaagtcactgaacccctcaaatgctgatatcctgccctcctagatgctgataaccacctgtccccaaagaacacacgggcaaccaagcacagatctgatttttaaggaatttgttttgtaagtgcagtttgggaatctggcctcatttgtctcttgtgtgcccttgctgacaccattcattcagccctggccttgatttaggtgacaccgaactcgggctgtaccctcagagatttccctctttgtctacaaacaaacaaacaaagcaaatatcctaattaagactcttgtgtgtcaagtagggcatctaggaatgagtgctgggaccactcttagtcccagaatgccttgaaaccaagtgaatgacaattatacatttagcttctcaattaaaatggaagacattgggccgggaattggctcacagtggagagcctaccaggcttttgtgaagctctgaggttcatccctagaaccattaaaaaaaggtccgtgggcctgggaatgtagctccctggtacagtgcttacctaacatgcacggacccctgggtttgctccacagcatggagtaagcagtctgatggcacacacctgtaattctaacacgcaggaggcagaggcaaggaggatcaaacgttcaaggaccacggcaagtttgaggtgtgggccacatgtaaagccgtctccaaaaagacatcacacacaaaacacaacagtattgtgatacacacgtatacctgtatcctagcaacctgggaaactgaagcaggagactgtcttgagttcaaggccagactgggctgttcggtgatcgacaggccattctgagttacagagtgaggcccttggaaaaggagaggaaggagaggaggagagactgggcctggcaacatgcatctatcatcttagctactcaggagactgaggcagggggaggatttccagctcaaagtctagctacagagcacgtctaaagccagcctggacagcttagtgagaccctgtttcaaaataaaaagaatctaaaagactggaggtaaagctccagtgtagaatgcttgcctggtaaccaggaagccttgggttcaatccttactgtaaaaaaaggaaaaaaaatcatattatgcaagaggtctaaaggcccaagaatctgttacagatctcagttttggtaatagacaataaaatataacaagttggtaaaaacaagcaagagtaccaactacaaacatacttcatgtggttcagcagaagcatctcagtatgcatccagaaaacagcagacagacagaattgggcatccttgggctagggcacacctcagcctgacttctacccgagaagccagcagtcttagccagtgcagaaccactggtgtctctgacttgggatctctgcttaggatgcgcccttgagtgcttagaatttgtctctagtcaggctgaatcctctctctttccaaacccagtccttagctatttaaaaccagtaaactcatgagatttggagtcatccaacgttatccaggcaaggattctgtttttttcttaatttttatatttaattgcttattaatttttgaaataggatctcatttgtgtggccctggctggccttgaactcaagaagaccatctgcctctgacttctaatagctgagattaaagaggtagcctcaggcaagaacttaactatagaccaagactcagttccacgtgaagttttttggatcttcccacacagagggtataactgtgtcatctccaagatgaggtatcccgaggaaggagaaatggcctgggtcattgtcaccaaaccagtgggtaataggttaatggaaagacacatgtgtctaaaccaccaaggaggaggaggaagagggcaaagaggggaaagaaggaggagggggaggagtgtcatagcccaggactaggtgccttctttgcctacacacggacctacgtacagaaggacagcatcagagaacttgggacccgtacaggaacattggtgtcaagctgtactgcttcacagcccgttttactactgactggttgtatggcccacccggcaggtcattgaatcctctgtccttgtgtgtaaatagaatttgcatctctatataggtattaggtgagagatcggtttgactcctggttctggcataatcatcatatcgcacagtggctggtggaggtcctataacagttaagcaaaacctgcccaaggtctcatagctctgagtacgcgtgaaccaatggcatagctgatctcttgccctagtctcaagggctgacagaatctaacgttactctaaagtcagaaacattgaaaatataaacagctgcccgtattggttttggtttttgttttttgttttttttttttgtttatttgttttgttttgttttatctaatgcagtccctggatatcacctaaaatgatccctctgcctcggtttttttttttttttttttttttttttttttttttggttctttttttcggagctggggaccgaacccagggccttgcgcttcctaggtaagcgctctaccactgagctaaatcctctgcctcggtttttaaaaccggcctggagtagagccgatggctaaaggtttgtgacccccagcccggaacgtgcctacatatgcccgctcatgagtggggaatatgttgcgatgagtgtccgttggctctgttgctgtgtccagaaggaaggggctcaaccaaagaccatgatgggacagagacagacaataaggacccggaaagttcgtaatcaaggctagtctttataaaactgtctccttcgcctctgctagcttcgattcagagagacgtgggcggagccggtcgctgcccaggaactccaggaaaggagaagctgaggatagcgcgctacgattgtgtttacagagacagttgggcttcctgaggtgtgttctcgtaatgcactggatcagtgatggcctgtaatatcccggaaagcactacagaaacatgatgttccacacgtcacacgggtcctcctacccgggccctcctactcgggcctgtggcaccaaagggggcggtcccgttgtgcacaccggcgcccgagggagctctgcactccgcccgaagagtgcgctcggctctgccaaggacgctgcgctcgtgactgagcgcgggctggagcaaccgccaactgagtgcaaaccctttgcgcccggacccgtccaacgactataaagagagcagactgtccgctaagcctcatcccgacttcagcagcctgactgccttcttgtcgcttacaccgttgctccagattcaccagatctcggaatggaccccaactgctcctgctccaccggtaagacgcccggtccttggtctttagaatacccagttgtaggggtttggcgggaataggcacctttagttgacaattcgtcctagttctttctagaacccgctcttggaatcgccttcacctgttcttggagtattattattgtccgaacggctccttgtcggggtttggggtaggatttagacgcgcaaataaatgtcccgatcacccacgtagtgggacatctgagttgagacccagttgttactaaccttattgtgaattgcctgatctacaagagaggtgagagaccgttgtgtcttgagatcaaagacccaagccttaccctaccctgtgaggagagaagaggggctaggctccctggagttctgaatagcactttgaattgagcagggcacatggtgttggccactgctgtaatcctgcctcttactgaccgctgtcttccttctcctccacaggcggctcctgcacctgctccagctcctgcggctgcaagaactgcaaatgcacctcctgcaagaagagtgagttgggaccctcgggtggtggtgggggaactcctacagagctggctctgagaaacgtctgaggccattcggtttggggcaagaagcaggtcttctgccagacctgtgcgaccggaggactaggaagcctactctgacatcttcctctatctttctttccaggctgctgctcctgctgccccgtgggctgctccaaatgtgcccagggctgtgtctgcaaaggtgcctcggacaagtgcacgtgctgtgcctgaagtgacgaacagtgctgctgccctcaggtgtaaataatttccggaccaactcagagtcttgccgtacacctccacccagtttactaaaccccgttttctaccgagcatgtgaataataaaagcctgtttattctaactctggttttcttggtgtcgtttagaaataagaaactggggcgacacgggttaacttgatagtctggggatctggttttggactcgcccgtgccttttaactcccgcctctggctcccaaagaggggtaataatgtctttgggtaaagccaagttatcccataagctt

SEQ ID NO: 1095 - DNA, 545 bp, Rattus norvegicus
  Genbank Accession No. AI010262
caagataaagagtctttattgacatagagctccacgtgacctcttctgtcctgccctccttgcaaacatactaggtgtcccaaaggtagggacacgagcagacagtcctgagcctggtcccgtcctccaaaatgcagtcagactgcagtctgccatctgccatccctatcatctggccaccaaccagaaccagccccacagttcccttgtggtctcgccttggctgccagtggtggtgtccactgggacctgccactaggctgctgtgtttgtttactgggatcccacttccacatcctgggagccctggcttctggccacatgtgggtaactggcagtgactttgggcaatcaagtttgcgttcttgttgctttccacaactgggccaagctgggacagcaggctctgcttctagtctcagtccgagctgttcaatgaatagcctccttggggcagtatctaccctcccttaactcaaaatttccactagttagggcctcccaagccactgccaggccagctgcgagtttctaggaccaacttc

SEQ ID NO: 1096 - DNA, 5486 bp, Rattus norvegicus
  Genbank Accession No. U48828
ggtcattgggcttgaggatctccctcctgagggaagattctctctgagagtcttacatatgggggctcgtccgggatcggagatcctctgcctagagaccaccgaccacccaccgggaggtaagctggccagtgtttgtcttgtcctgtcttgtcttgctttgtgacttgttctgtaaatgcttagttacttggcttgggtctagaccgtttgtatttgggcgggccagagaaggagctgacgagctcggacttctcccccgcagccctggaagacgttccaagggtgtttagagcccggtttttcggggctcagcctgtatcggaaggatacgtggttttggtttggaggagagaggagagagccggatccactgaaggatccggacccttgtcgcctctgtctgaatttttggcttcagtttggacaaccaagcccgcggcgcgtctgtctgtctgactgttggaattggctggcttcttagggtcctaattttctttgaacatctggggaaattggttataggatgctttggcttggtcttgtttggcttggttggtttctgtgggattgtccaaggtcttcttggcttttgtttcggttttgggacttgggacaagacaactttgttttaaaatcttgggaactgacgaattgggtttaaaaatcaatgaaacttggtttgctttgtttgtcaaggagttttacttggtcctcttggtgcttaacttggaaataatttgcttgagaaaaattgttttctcccagggagttttatctttctctcttgagcctcctccccaaggagagatgcccctccctttgctccccttgtccattctagctgctgttaacagttgtgtatgaagaactccaggttagtgagtgaccctgtctgaagcaggtattaacaagagcctgaaagctttaccttagatcctgaagaaaaattctccctgttgcttaaacattcacagcttctaaggaagggacaacacagagtaggaaaatgtaggggctgagggtgacaagcatgcaggcctgctagcaagctgcaggctgcgcgtgggcagtggcgcagctcaggccaagtcagcgtaagaggagtttcaaggtgatgaggccggccgcctttgacaacaagaagataacgtagagttagtggtgttttatgagacttttggccctgaaaaaataataattccagttgctgccttcagtgaccagaccttcaacacttgctaacaaaaggagagtgttcattaagagaagttctttaagggagcctgccatatctgctgcccctattccaagagaggagttgatctccaacattaagtaaccttcccctgttagtcatcattgacatggagagtgcctttgatcctatccccacagcagccagttcctacccctgtggtcaaaatgccccaggttgggggacagagaagcccctaaaatagtttcaaaaagaatctgcaacaaactgtgaagaactttgttttgccagtcaaaatttagaattcaggctttggctgtggccaaggtcaggattaatgttttcttttccatgggcctttagcccactgagacagtttggtaaagggctgctactgaggtcctgaaagtcccaggtgaactggttacaattcttttgtcagccacttggcatctagcacccaggtcctagccatctctccatccttttgttattagttcttaagtccagagagatagtcggggtaacagatcagctccctctctgcttggcgttctgtttcacagacacaaagcttgtgcttatttttacaacagcctttttgtcccaaaaagtcctcctggtttagctgtgtgactaaatgctatttgtcctcttcagtggactctattctcaagattctcttgttttctcaccatcccatttgagatgcttgttagtaactgttacaggtcttctttacactgaggaaagacagaatcctactggaggcagaaagaatgttccagacatggatagaagaccctcactcctgactgttgacttgaatactcctgaaggtagggagtgctccaggtctgccaccaggctccaagggtgggtctccgaggggctggaaaatgccccaccaatctggctaagataagggaaagatataaagaaagaaagttacagaaatttgaagggttaagctaagttgctgagagttagtgtaagttgcagagaaagtaaagttgaagtgtagttacataagtgggcagcatctaatatctgtagaggaagatgcagaagatatgagagagagactgaggaagagaaagaggaaagaaggtaaaaagagcaggaagctaaggaagaaaagagaccaaaggaaaaagaagctagagagctaaagagggataaaagacaggagaggaatatatactggccacagtagttaggaaacctaggaagacagtacctggcaacagaagagaattcctagctaaagatcagtgtgcctatcgcaaggaaaaaggacactgggtcagggactgccccaggaagaacaagaagggcctctccagcaacccggaaggcaagcctcttggttctagagtgctggctatgcgctaagatagaagggaagccggcccagttgttttgtgaatacgggggcccaacactctgtgctcctacgcccaaatgggctagtgtcaagcaaaagaccttgagtacgggggttactgacaacaaatgatactcatggactacccgaagaacagtggaccttggcgtgggccgggtatcccacttgttccttgtgattccagactgcccctacgagtctaaaccctgcaaccctgctcccggaccctgacctagacaccccccttcatgactgtcaacaggagctcactaaagcacaggagtggcataaagatcggactgatcagccaacagagggggtagatgccatctggttcatagatgagacagctcttacagaagaaaaaagatgggctgggacaacagtggtagatagaaacagagtcatttgggctcaggccctaccagaaggacaccactactcagagggtagagctcgctcccctcaccaaagcccttgggctgagaaagagacttaacatctatgtggacagcacgtatgcctttgctacagcccatcagcagaggggcctgctgacatctgagggcaaggaaaaaagagattctggctatgttaaggaccctctatgacccagccaggccgaggaagagactctggtacacctcaacgagaaagaagatcctgctacaaaaacaggcagaggccatggtaaaacaaatacatcaatggactcacttaggggtaagcaaactcatccagacattttcaaaaactaaatattatgtcacagggtctcaagtatctcgtgggaacagatagtgcactgatgtataccaggccaaaaggtaactgttttcaggaaagttgacttgtggtatgaggctccgtgggggaacggcctggatactactgagaagtggacttcacagggataaaaccaggaaaatatggttataaatgtctcccagtgtttatagatatcttttcaggaataggtagagctttcccaccaagcaagagacggcctcaatagtcatcaagaagatactagtaatgtatcaagaagatcatagaagaaatcttctcccgatttggaatgcccaaggtaatctggtcactgacaacagtcctactttcgttgccaaggtaagccagggtgtaaccaaggtatttagaggttgattgaaaattacgttatatttacagacctcaaagttcaggacaggtaggaataaataaataaaattttaaagagaccctgaccaattgaccatggagactggcgtagactgggtgacactccttccctcttgcctctcttcagagcaagaaataccccttccagattcagctttaccccctttgagatcttatatggggcctcagctcccctgactatattaagatgatgttactgaaccaacatgtcatagtaataatgatttgtatgccaggctaaaagacctacaggtgatatagaagaatctgctcacagtgacagcagcctatgccccggggacccccgagacatgtcatcacttccaggttagagactacagctacactgagccagacactcgagctcgctagaaaggaccgtacctagtgctgctgaccacccgtcacagccatcaaggtctcagccctcaccagcagcgtactagctgttggggctgagagctgggacctagagggacatcagatcttcaaagctcctagacttaagtgattggaggtgctataatgcctattgaggagtgtgttttaggaacaagaatttcatgtttgcctgttttgccctgggttcccctcggaatagttgtaaggataggcttgatttttatgccatatgatgtgacattacatatgttgagtactcctaacacgtcttggggctgtccctcagggtcgcaacctatataagttttgaagttcttaaagaccttgatttatagttcagatagtttccagattagaatcctgattctaaagactttataaaaccccaaagagagttgagaattatttaaggctatctaggttccacaagggcagcacaaggacatcttcagtttccccgcaattccggaagagtgaagaaagactttttagctcacctccaagaatacctaacctccctctcagaggtagtccttccaaatagggaaagattagacctgatattccttaaaaaaggagtctgtgttctacactaaaaaagaaatgttgtttccaaacaggtcaggccataattattagagatagagtctttcagtcaatccaacttttgttctgagcccacagtatcagatggtggaaaaaaaaaaaaacagaggtacctaaaacaagttgagtggaagattccactcaaggacaaaaagaaaatgggggaatgaaagaccctctcccagaaagggaattgtacaagccccaaggccctcaactatagaagtaataaataagtgttagatatgtggggcaagctgacccatcatttaggcggaacaggccagaaaaggaaccccaaatgcagaaaccagactaaattatgggccctgctccatgggccacctggcaggaaaaagaaaaagtccctgaccccccggaagccctgaccaccatgtactttttgctaactcactgttatgattatagcccaaataggtaacatacacgtatgcctcatttactccaccaatcacatccctgtaaccattcatctgcttctgtaagcctgcttctgctcccccaaatactataaaaagcccaccctggctctgctaggcgcgccagtctttcaaattgactgggacgcccacagatatctgtgtatcctgatcaataaaaatcctcttgcagattgcaaaaaaaaaaaaa

SEQ ID NO: 1097 - DNA, 479 bp, Rattus norvegicus
  Genbank Accession No. AA924352
tttttttttttttttatataaaggcactttatttaaaaatcaacttgtctgtgtaaagaagtcactctccaagttccattatccgtgtttgggagcacagtcttcggtatttttctgggctcacagagtaagctgacatggtgttcaagaacttgtccagtggacagagcttgtcggggcagcctcttggtacttgctcctgcccgttgtaggagagccgcacaaaccactccttagattcttggtgctggtagagttccacggtcaggtcaacagcaaacgggggccacttgttgtcaaaaatccccaaggccaacagcataggcaggagggttacatcgtgcgttgcatagaggtacatcttcctggtcttgctgggtggggtggaagggtccacagctttgagcaggtttccctccaggatgtagaggaatgggcccacggccatctggatactttccctgtcttcctgttgcagc

SEQ ID NO: 1098 - DNA, 563 bp, Rattus norvegicus
  Genbank Accession No. AI012393
cctataaaactttattaatagatactgaaaattgataaaatttttacacaccagaatgtacaatttgctattttacatgaaatgtaaacatttaatctaaaatcacattaaatgtgaaaatactttaccctcccacatggagtcacattgacgacttagacagtgatccacaccttgggaacagagtgtccctgacacactggaggaattgagattcttcctcctctttgccctcctcttgttcctcccctttctctccctcttctccctcctgcccctcagacacacaggccatggagctgacagtcatggagacatttccagacttaagctggaagtatggaaggagagtcccagataaggaagcctcgtggaaggagaaaatgtgggacttgtaactcatgttatagaaggagatgttcctttcgtcatagtccacaaacacccccacactctgcggagcttgcctgatggataaggaattcctcccagagtcaacatatgcccaattcccactactagactgccccactgtccaaaaccccttctatggactctcaaaa

SEQ ID NO: 1099 - DNA, 422 bp, Rattus norvegicus
  Genbank Accession No. AI113076
tttttttttttttttttcggtgatatagcaaaagttttattcacaggaaaactcgaaaacaaaatcacaacccaaaccaataatttctatctggtccctgccctcgccctccctccaagcccctacatatcctccacttgagggggtcatggtgcatgcagggagtggagctgacggatcctgtgttccttggggagaaaggagtcctttcaggtctagttaactgccctccacactgatctctctcccaggctctcccatcctccaaacaccgggaagaatggattcaggcacgttgccaggattccccccaaattcgttgagaggtcatgcctgagccaacagcattccaaggctttcagggttacagctcatcttcatccagcttggcgagcctggcctgacccgggggactgttcaca

SEQ ID NO: 1100 - DNA, 542 bp, Rattus norvegicus
  Genbank Accession No. AI011799
ctgacagcttttcctctttattctcaccccgctgacatgcaaacagaaccgaaacagtgctgctcaaaaaaaataacaaaatgttttatacacatttccatatatacaaccgaacaacattttacaggttatcttttgcacagcaaaagaaatataaacattcggctccaagaacacagatatatgtacaaaaaaaacaagtcaaaaatacttcacaacggtgcaaaaatattttacatagcatcatggagtaggagctttggggcatgaggaaggtgtgtatttctaaaggaaaattccttttgtgtgtgtgtgtgtgtcttagatattagatttctttaactgtaaacaaaacacaactttcataccccgccctccgccccccataaaagagttatctgagaaatttggcatactttcaagagtttgagtctgacgtaaacagcccaagctctcatatccaaatgaactgggggcaggtaagcggcattaaagcccaacattatgaaagtgactttgttaatgagatattgaagacagat

SEQ ID NO: 1101 - DNA, 589 bp, Rattus norvegicus
  Genbank Accession No. AI237646
aaaaatataaaatttattcatagtcactttcacacagggttactctcgagctagcatcctcaagagctcacagcagtaatagatcgctatcaaatatagctcatgctattggacttggagaacgctcgtttcccctttaaaaatgttaaggctcagtttccaaaaggtagttattaccatttagttttctgctgccaaggctggggagtttggggctaaacggcttacagtgaggttgcgggtagggcggcaggaggcaagctccacatagctcactctcgcatcgtgcagagagtgccgttctttttcttaaaggttccttcccttggaaaaagtcattttgttacaaagacaaacaaaacaagcaaaagtaacaatcataaggcaaaagaaatctttagcacacaaacaaggaaagctaacagtgctttttccattgcgtctggatgaaatgtgttgtgggaacaaacgccgctcctcgcggttcttaaatgaatctgaccaatcagcaccacttcccgcggttcttaaatgaatctgaccaatcagcaccacttcccgcggttcttaaatgaacctgaccaatcag

SEQ ID NO: 1102 - DNA, 412 bp, Rattus norvegicus
  Genbank Accession No. AA851184
ggtgacgccagatactttactcatctcaggcagtctggactagttcccctcccgtggactccagggtaacaccagaactgtcctagaccatagctgtcctctctggcggctggaggtaggcctgcagggcacggtggaggaggaagcaggtctgtgggtggagggaagcaggtctgaaggtggagggttccagtgtagttgtggctcatcctttcctatcacctctcatcatggttcacagtgttgcttccagggacatctacctagacaatggggtccccaaatgtgcaggcctcctcaatggcgaggttgtagctggaacctgtccctcccttataggtgctggtcacaattctcatccagcctcgctcaccccaaggctcgccccatgaattgcggacaatccaatact

SEQ ID NO: 1103 - DNA, 680 bp, Rattus norvegicus
  Genbank Accession No. AA800222
  misc_feature (1)..(680): n = a or c or g or t
ggacttagcttccactttattttcatgtgcatcatggaaaggtgtcaaggacaaagacaagcccagtgctgcctgctctaagtaaaacacagaagagacaacacctcacccagttcaacagttataaaacccccaacccacagagcagacacgagcagtgtgggagtccaggggtccccacacaacatgacaagattttgctttttattattgttgctttataataaaaacaagttgctatgctttcagcaaaacaaaaacaaaacaaaaaaacccatagaaatttaactaacagcagttcaaggtaaggcttttgaaagatttattgaaataaattatcttcgcctatccgcctgttatccttttctcagttacttgtcaacattctaaaaactttcaggtatgtaaaatacatttaactttgccaataattttagataatactggattttccccaaaaggactaccataaaactatgttttgaaacattaaaaaaaaaaagcttaatccaatgggacataaaactatgtaacctatgattgcatgtttcaaatccttaaatacgtggagaatttgagatctgggaacaagactgcttgaggcatgtggattattcaatgtcctgcttctatttgatgagacccacaggaaccanagcaggagaatgaagggctccggg

SEQ ID NO: 1104 - DNA, 528 bp, Rattus norvegicus
  Genbank Accession No. AI180040
acattttaagattataaaaattggtttattgtaaaagaaattcaagaataaccagttaaattcttatctgcatgctacccactacagccaggaagcattaaacactgttggacacaacaagaagactacgttgaggctgtgattcaaattcagtgagagaaaaggtgctcgggtctcccacagtcagcacggagggtttgataaagtcagaggcactgtcaggcaccagggctgctggacattgaggtataaccaggcacaccatgctgagggagaaggaaggtgacacatttcactttgtgagggaggttaagcagctggaaagttaggaaaaactttactgggagcaagatgagagcgaagtctttaaggaagagaaattaagttcataaaagcttttctaacagtaacagggctctgctaccttttaccagcccatgcccacctgcccttcccctccccacactgaggctactctgcccacagaagatgtggtcctttgttctggagtttcctggagaaatatgg

SEQ ID NO: 1105 - DNA, 358 bp, Rattus norvegicus
  Genbank Accession No. AI009321
atttttacatcaaggtgacaaccaattcatttgttacaccaagaagcgacccattattagtgttgaacagtgaacttgcctaggatcctcagcacttctgagtgaggaggaaggaggaaggaccctaaacgtcaactgcgctgggaacactcagaattctcaacagactctacaagccaggacaaagcttatgcattgaatctactgagcgcttaatttttggcatctctggaagccagtcacgcaactgctcaagtatcagaaaatacttaaaatgtactctcggtatataaatacaatcttaaatatctttatttttgtttttattgctatagaaagtgctctacattgaataaaa

SEQ ID NO: 1106 - DNA, 599 bp, Rattus norvegicus
  Genbank Accession No. AA800169
aaggtgtcatgaacttcctggtagtaccttagttaggtttccatctctgaccaccatggacaaggcaactcttagacaacacttaaatggggctggtttacaggttcagagtttcagtccattatcatcaagatgggaaacatgggcagtactggcactgctgagagttctacatcttgttccaaaggaaaccagaagactgtcttccaggcagctaggagaaggtctcaaagctcacttccacagtgtcgcacttcttccaacaagtccacactactaatagtgccattctctgggccaagcatattcaaacacatgagtcgatgggggccaaacctcttcaaaccactacaagtagaattctcatgaaatatgacttcatgattgctagactctaatacaggatttttcatcttgtcttttactattctcagtataatcaaacactgaaatatttacttatgtgactatataagtcacacacaaaaatgtaaactaacattaattaggaaaattttcaagataaattacttagaaataatttttataatcccaacacttaggaggcaaaaagcaagtaagtgtaacttttttccccc

SEQ ID NO: 1107 - DNA, 1857 bp, Rattus norvegicus
  Genbank Accession No. X07686
aagcttaaaactttaaaatcgtatgttcttaagttaccaaatattttctattacttcatctctcttgtcttgatcacgcagcaaacttgttttggcacaaattaccacatgaattctagagcccagtttcatatgctattcacagaatgatgtcatggtaatgatgccagccacagacagtgggcttccaacctcaataaattgtacttttcttatgttgtctttttttgtaggaaagacattaaacccttataatccaaaagatcagaagcagggagctcatagccaatctaagtgctacctgcaattctatcaattagaaatgggaccaatctaaggtcactccagggcatctccagggaaagggtacatgtttaatgtcaccaagctaccagcgagtagttcctgggtgcagattcctttagtcatgcacagtagattaattccaagaatgacagtcaagctcctgggcagcaccccgtgagcaaacttgagccttgggaccacaggtaagaccaacttttctgctgcaagagacctgcctggtgatctcgggacatacagaggcagaattcctctaggaccgggcacctcctgtgtttaccgggagtcccacacccgcggatcccggcccgcagcagctctttgctcccagacaccgtgggagagagaccccaccacctggtcaggtgggcactcctgaggctgcagagcggaatagaccaccaacactgcccacccctccctacatccctggcccaagaggaaactgtataaggcctctgggttcccgtgggggagggcccaggagtggcagtacctcttcctctgagacaccgccggaacctgaaggaaacagaccggataaacagttctctgcacccaaatcccgtgggagggagagctaaaccctcagagaggcagacatgcctgggaacccagaagagactgcagtctgcacacacatctcggatgccagaggaaaacaccaaacgccatctggaaccctggtgcactgaagttcctggaaacagcggcgcagatcttcctggttgctgcagccgcagagagctcgagggcagcaccccgagagcgaacttgagcctcgggaccacagggaagaccaacttttctgctgcaagtgacctgtctggtgaactcaagacagaggcccacaggaacagctgaagacctgtagagaggaaaaactacacgcccgaaagcagaacactctgtcgccataacaggctgaaagaaaacaggaaaacaggtctacagcactcctgacacacaggcttatagggcagtctagccactgtcagaaatagcagaacaaagtaacactagagataatctgatggcaagaggcaagcgcaggaacccaagcaacagaaaccaagactacatggcaccatcggagcccaattctcccaccaaaacaaacatggaatatccaaacacaccagaaaagcaagatctagtttcaaaatcatatttgatcatgatgctggaggacttcaagaaagacgtgaagaactcccttagagaacaagtagaagactacagagaggaatcacaaaaatgcctgaaagaattccaggaaaacataattaaacaagtagaagcccatagagaggagtcacaaaaatccctgaaagaattccaggaaatcataaataaacaagtagaagcccatagagaggagtcacaaaaatccctgaaagaattccaggaaaacacaatcaaacagttgaaggaattaaaaatggaaatagaagcaatcaagaaagaacacatggaaacaaccctggatatagaaaaccaaaagaagagacaaggagctgtagatacaagctt

SEQ ID NO: 1108 - DNA, 354 bp, Rattus norvegicus
  Genbank Accession No. AA964589
ttttttgttttttttttactgccaatgtcacgcattcacggttcaatttacatttattgagcattacacagatgatcaatcgaattcatgacgaagctaaggcacttatctgcggttccatagattattttaggttgggaaccctggagctctggctgccccttgctgtgcatataatttgaatatctattagaaatgctttcagctacaagtaagagactgctcaaaataaacaaatgtagacaatcatgtattttcaccaaacaagatatctggaggtggtcagatccccagatgatgggctatcccagcaataattctgtcaaggatccagcttccgttcttccaatctgg

SEQ ID NO: 1109 - DNA, 612 bp, Rattus norvegicus
  Genbank Accession No. AI236146
atttaaatcagttttatttaagaatttccaagagtgacaactcttataaaaagcatccaagcacaggacacagaactgcagcaaacagcattcttatgaatagctaacagacatgagaacttccacccttctttgagacacctgagctcactggtgaactctgcttccaagttctcctgcaaagcacaccacaagctcagtccatgttcgcagcccatcagcttcagttcacgttcccacacttccagatcagtaacagaggagaacacacaccatacagcattcacagcagttgacagaggggagggaagtacaagtatttcacttaacacattcagctactgtgggtttcctaagaacaaaactcaaagtcttccaacagacgtggatgtcctctgatgcagaaacactcgtacgttagttatctgctatcattgctctctgcacactctcgcaccaaagccacaggattgagggacacatctctccaagttaaaaaatatccattttccaccaccaagtctttgcacgcgctctctccttttctcgctcatactagcctttcatgcctcggcaccaccatcaatcccacacaaggtttcaaaagttcaa

SEQ ID NO: 1110 - DNA, 523 bp, Rattus norvegicus
  Genbank Accession No. AI136516
  misc_feature (1)..(523): n = a or c or g or t
tttttttttttttttttgtatatccacacaacactgatggcttttattgcagatttgtgtcgttacaaggcaatatattttaaaaaaacaaaaatgaaacaccccccctgtatttatacacagacatgctacatggtacactgggagaagtgctgaggtaatgggctgtgcccccggatgtggacagtaccaagtgccccacctcacacgtccagcacactcacccaccggagggtctcgccttcttgatttatctgttgcccctggcgtggcagtcatctggtaactctaagcaggactcaggaagctactgtgctgcagtgcaccaggaaccccagagggcattgcagctcatggaaagtagtcagtttttccttctgtggccttatcttctagggagatgtagcttggtgacaggatgaatgaagttgttcccatgggcacanggactcanatccgcagctctctggggtccaacctattggcagtgacttctctccagtggagtgtctctggcanagca

SEQ ID NO: 1111 - DNA, 495 bp, Rattus norvegicus
  Genbank Accession No. AA800566
caccctcagcagaaaaaacaatacagtgatagaaaacctccccagccctcccacaccccaattaaaaactagaaaaaatgcctgtcctcttgggctgcgatgccatggtagtctgactcctctggggcactgccatggagtgggctggcccccagagcaccctccacttcaccttggggaaaggaggggtgcttatggtcacaggcgttaaaataggagttccagtggtacccgttcccacacatgcacttccttccttttccccagggcctggaccaaagggataataggatagaagtgagccacaatcagcagattcaggagcagagacacagcctacaggaggtcaaggaggctcccggcacacctcctccctctcccccatttaaaaaaaaggcatttttggggtctttatcataccaaaaaaaatggttcctttcagacctgagaaaaagaccaagatgtccagtctgggcaggagaaactgcactgaac

SEQ ID NO: 1112 - DNA, 312 bp, Rattus norvegicus
  Genbank Accession No. H31420
ctgtatgtggctttattatttctgttttatttctgaaaaccccagaccacgttactttttagtctactccctcctccgtgtcagggtacgtaggggggaggcttctcccctgggaggaagtaggctggtgtgcagggtgaaggggcatgaggatgcccatggctggagtggcactgggagggagactctgtgtcctcaggcagaaagaggtcagcagaggccggtggggcactggagggctgtagtggcagagggtaggaggaacaggttggcacactcatagacggagggcacaagccggtgtaggctagg

SEQ ID NO: 1113 - DNA, 543 bp, Rattus norvegicus
  Genbank Accession No. AA944367
aaaagaaaacatggtgtgtattttgcaggtttaagacaacccaagacagtgaaacaatggactatatatgcagatatagaccttgtaagcaccatcatccgtatgagccacctatatatttaaacttgatcaggccacattcagacataagctcttatttacaattatttaaattaaatacaactggaataatgttttgttacatatacacatatatataaaagaaaaaaactgtacaactcagcagtgttttaagtattacatttccgcttaggctctggggaccactggtggtggtcaagtctttatgactccttccagaaagtccttttctatcatctcttcaatttttttgcctggctttgctggaaaatgctttgtgattctccagtttcatgtccttgcttgggaaggagtttgagtagacgatggggctccctgagtgtcctccacagcggctcgtgactttgctgttgaagacttggctgaggacgttgaagaaaggcagaagctgctccatgttgcgcatggtgcacaaggtga

SEQ ID NO: 1114 - DNA, 592 bp, Rattus norvegicus
  Genbank Accession No. AI171776
acaattcaagcttttatttggctttgagttcattatcacaacatagacaatcaacatgtaaaataaatagcaaattcacattccgaataaatagtaaacctactttgcatttgtcatgcctgatgccacacaggtacagtcgttccatgacacaattagggaatgggcctacatcggagctcaagcctgtgctaacagagaaaaacaatgcaggagcactttgggaggagcagactggagacaaaaagtttcatgcaggaaggtcttgaaaggttcactgctgggatccacatttgggacaaggaggggcaaactagttgcgggggaggggtgctgcaacacaaggcaaacacaagaaggtcttggtagccctaaagggagctctggagctagccccaaagtaatgttggagagaccaggccctgtcccttcatagggaacagtcacagattatacactgcaggaaaggcatgtgatccggagcaaagcaaggctgcgcgtcaaggaaattctcaaagagaaacacatcagcccgaaccactcccagcccctgggatgaatcagccttcagtcctgagcccagcagagtcat

SEQ ID NO: 1115 - DNA, 504 bp, Rattus norvegicus
  Genbank Accession No. AA849917
aaagatagtaaaacttgggatttatttattcagtcataacttaaagcttaactacttcttctccgagcatagacagtcttctgtaccatggtcctatgtaggtatttagtcaggagagtgaagagttaacagatggaaaaggtctctggggcagtccatttgctgagacctcaagtgggacagggcagtgagcagagacatctgaccagggcactgtgggtaaggtaggggtgcctcagacttggccctgctactctcgctcctaaagaactatacccttcaagcctcagcatctcacaccccaatccctcaggctctgcttcctggatgcccaactctcaacagggctgccaaccactaagacagacacagctgctatgtcccacctctcctcagcagttaaaaaggaagagactaacggggagcctcggagtttcacttactggtcacagttcgctatgatgccatcatcagtgtaaacaatgttgctttagctgtgtaaga

SEQ ID NO: 1116 - DNA, 500 bp, Rattus norvegicus
  Genbank Accession No. AA945769
aatcaaatactgcaggactgatttaatcagtataaaattgaaagatttagatttgtaataaaaatccaaatttgaggaagggcaaactttaaaacagcagccaagtcttagaggaagggcaggtgagtgcaggcacgctggactgtggggcggggaactgaccactgtcaaaccagtgtaagttgcttggtttctcatggaaaacattttatacacctaagtccatcagcgtccaaatgtctgttctgttggtaatatcacaacataatattacatttactccaaattctgtcccatgtgggaaagttagatgatttcaaatactttcttcagctccacaataagctgccagtcactcttctgcatttcgtctctgaaccagtctttgagtgcatcgatggactgccggctgatcttgctgacaagaatgtctgtagcttcgaagtgtctcccaaacatttttggagattcccaaggatacgttctattttgacacagac

SEQ ID NO: 1117 - DNA, 498 bp, Rattus norvegicus
  Genbank Accession No. AA997845
tttttttttttttttttgcattgtccccgtgtattttataaaaacaaaaacagtcttacatcaagtgctgaaaagatacaaatgagtcgagttattgagcaaataaaaacaggtctgagctacaccttttcaacccagtaaggctcagctataacgcggttttcagattgccagcatcaggggactggagctcagctaacgagtttcggcaacactgtcctctgctgaatattcccattggcatctgtcatctgtgccaaattagtcctcagcttggaagctgagctggaaggtggaggtaacttggaaatggaggtgatagcaccagtactctctgtgaccctcttcaccgcagtcttctccccggtcggaggctttggcaaacgcctcctaagccacgggtgccgtagagcctgtcccggggtcattcggaccgcgggatcccactccaaacactgttttaagaagtcaaggaaaagaggatcatccctcgtgccg

SEQ ID NO: 1118 - DNA, 471 bp, Rattus norvegicus
  Genbank Accession No. AI009411
ctttgttcaagattttattaaacgtctttacaagacaacatccagcctccaaatgcagctgccaagaccctgttatgctgtaggcactggctgaggcatggcgggtggctctggcttcccacccttctgttctgagatgggggtggtgggcaagatttcatctttaggttccacaatgctcacatgatcaggcagaggcttcttgggaccaatcttaccacttgggtcccagggcagcatgatcttaactttgatgcccagcacgccctgtctgaggagcacatggcgcacagcagtgtcaacatagtggttaacaggggctccgctgggaatcatcagaccatccacaaacttcatggacttggccctctgccctcggagcttcccagagaccacaaccttacagcccttggccccactttccataatgaaccgaagcacaccatagcaggcccttcaaactgcaagccc

SEQ ID NO: 1119 - DNA, 564 bp, Rattus norvegicus
  Genbank Accession No. AI234105
  misc_feature (1)..(564): n = a or c or g or t
gaaacttgcaaaacgaaaacaaaaacatcaatttcaagtcaggtttaaaatgtcttccctatcccctgctccaacaaaacccagccaagccagcaggacaggttacattaatacagggagatgaagtgaatggcgaaggacgagttagataaaggtgctgtagagatcacagagccaggggcatcactgactggcagtctcctccagagcccttggagggtagccaatctcagcagcattcatctggcttcatagagagaagcagggaggaagtgaagcctcctcaacccccacccccaacctcagttccgtttcctccttgtgtcctttgacccagattttggtcttactgaggcccagtgttccaacaatagaaggaggtaggggcaaaggactggaggtctagagcgtgggtatcttcccaagattcagtcctctgtgccacgggagacctttccagagaggtgagataccagatgtagctaatgagtgcctgggctatcacacgagagacccggcctgactctgtgcaggtaccattacgggcacggnacccatgcgggt

SEQ ID NO: 1120 - DNA, 522 bp, Rattus norvegicus
  Genbank Accession No. AA819206
  misc_feature (1)..(522): n = a or c or g or t
tttttttttttttttttagataacagctgatttttatttttcttctcaacaatctcctacagtttccaaactctctacaaagagctttaatatcaaaagacaaatgaactggtctttaaaaaagaacatcctcctccccaactagaaggctgaggtcaagatgaaacgctgcctcctgcaggaagtcctcctggattctcagccccatgcctaaagctccaggacttcgtgagagctttcgtggggggcgggggggtcccctcactgtatgttagcaagacagaattcacgacaggcaagcccagtatcttcagatacacccacagggatttgaagaccacttctcaggagagcatcaagcttggccactgtcaccagagggtgccgtcttggtcttcggaatgctgggttgaaaagtaggctgtatcccacagttcttgccanagggagtcttcaggagaggcggtggcccctctgaggtgtgaacaaagatgaggcagcttggagagaggctcagacagg

SEQ ID NO: 1121 - DNA, 475 bp, Rattus norvegicus
  Genbank Accession No. AI112365
tttttttttttttttttattaaagaccatcatttattgtttataaaaattgccccaatatacagaaaattcctaattccggtaactaaaaactcccacccgccttgtgtccacaatatccaatctagattggcttgatcttgaagtgtaatccaataaggctgaagactaaacacttcaggtcctggacaagataataaaacactcgcaagccttctggatccttggactggttgacatcaataagggaaccaatttttgatgttgtaaaagaaatgtgctcatctccaatgacaatttcgagttcctgccggcccactcgatcaggagggggccacagagcgtcatcttctttggtgatctcactgtcgtcaataatcctctttaattcttccatcacactcttatgtacataagcctctttcctgatcatgacatcatttttgtaattgctgttgttggcatatcgcaattta

SEQ ID NO: 1122 - DNA, 580 bp, Rattus norvegicus
  Genbank Accession No. AI105049
agagagggatctttttattttattttcttaacgtgtatcagtgttttgcctgcgcgtgtatctgtgcactacaaatgcccacagaggctggaagaggccatcgattcactgtgattggagagttacgagccacagtgttgctgctgaagctcagagctctgcaagagcaagtgctcccgacacctgtccctccggcttcaagaagccctctctaaccccctcccctacctacgacatcagaaacacagtcactgctgtttgtgacagagtcctgctggctttcaatttgccatccccctgcctcagcccctagatgctgggattacagtcatgcacccacaccctcaggattactgggggctttgaaaaggcagttagaggcaaacactaactgaaaacctcgcaggcatggggaatctgcaaccttaaagagggggccttcaggagtggattgcagggctgaagttccacagacttcccaagatcctctactaaatcctttgcaaatcctatcctgttcccggattccctaaacctgagcttactcctggaacacttggcccaaactcagcctcgtgcc

SEQ ID NO: 1123 - DNA, 579 bp, Rattus norvegicus
  Genbank Accession No. AI176212
gttatgaagacattttcctttaatttatccaaacatttgactttcatgaagtcatttatttcagaagaaatataagcgtataatattaaacttacaacattatagtatttacaagatgatagctgacaagagaaccttgcctgtatgaaaatacaaatactctatttatctcagctatttgcatagaaaaacagcagggagaagctcacccctctttagatcctgttaattctggagcataacgaagactgctgacacggaaataaaacttatgaatgtcccacatctacagttttagaccttcaacgtttttcttcaagttcagcagctccttttcttgccttcttttctccagtttgaatgctagcttgttagctttcttttcaactcttcgttccttccgctcctcctttatggcctgctttctggcttttttatcctctttggctctcagttttgagacggggctgggtggacaccttgggcagatcactgctgttgatcatctgcatccgttcgacctgctttgctgtgaggcctttcttaggtaggacatggagaagttttccccgtccttgg

SEQ ID NO: 1124 - DNA, 681 bp, Rattus norvegicus
  Genbank Accession No. AI234830
ttgctgtcgtttactttttttttgagtaggatcaatacacaaatttcaattttttaaaaaaaagttttacgtaataaataatgttatagaaatatacagtgtgctggctctgatggtatatcacagcacttgggaggctggggccagcctgggctacagtgtgaaattttgtcacaccctcaccccatccaaataagccacaaagtcttatcagaaaaccaaacagcctcaagcagaaaaattctctttagtaaacgacacaagaaggtgatgctgtctgtcagtcaggttcactaacttttcttaattctctttgatttcttcccctggtcttctactccattctctgcaggccgcttcttcaaccccttcactttcctcgtctgtagtttgcttaggtcttgcttctgcatatgaatccttccaaacgttgtaccaaaagtatcctgagagatattcttcctcttcttcggcttgagagctttgggcactttcatggacagtttataaaggtcgtctgatgctaagtgtgtcctcctcacaaccagatccaacgacggccccatctcttctagctcgattctcggtgttctgcacccagatttcttcagcagcagcttatagcttccaaagtaaaccttcccattcagtgccgtgaagtgcagaacatactctaatcca

SEQ ID NO: 1125 - DNA, 636 bp, Rattus norvegicus
  Genbank Accession No. AI172460
cagggctgtttaattaagagtcaagagtcgcttgttcttggctacagtgcttaacatgcagtcacacccacctcttggtacagaaatggcaccctgtcacttccctggtcagaggactcctgggcaccttgatctatatatccaacagaaactgccttcttgccaacagtggtaagttctttcctgcccagaggaactgggatgaggtcattcgttcaaatgagtagccatttacagtacagcaccattgactggccaatagagttgatattttctcaagttccaatcaagaacttgtattatgtaacctgtctctgatgagcccaaaggcacttgagagtctggctgtgcctcagggccacctgttttcactggactaaatatgaagagatatgaaaagtttgctgagtctgccccggccctggggatccactctataaagagtttatttcagcaatgttgggccacactggctctctgcgtcattctgtaggctcaagtgaacactgcagggagctctatgctgctcagccatagtttctaaattgtggtagagaaaatgtatattacgcatgtaaagaaagttaaaaaatacaaacaagaaattaaaggtaaaatgcaaggtgtgtttggatc

SEQ ID NO: 1126 - DNA, 1586 bp, Rattus norvegicus
  Genbank Accession No. AF002281
gatcccccgggctgcagggaactaagtgggttgtccgggttccgagactagcgctctgcagagacaccagatcgctggaccctctcacaggaaggcgtcatgccccaaaacgtagttctcccgggccctgcgtcctgggggttcagactctcaggaggcatagacttcaaccagcctttggtcatcaccaggatcactccgggaagcaaggcagaagccgccaacctgtgccctggcgacatgatactggctatcgatggctttggtacggagtccatgactcatgctgatgctcaggacaggatcaaagcagcatcttaccagttgtgtctcaagattgacagggcagaaactcgcttatgtcccgcagtgtcggaagatgggaaagcgcatccctttaaaatcaacctagaggctgaaccgcaggatgtgaactactttgaacacaagcacaatattcggcccaaacctttcataattccaggccgaaccagtggctgcagcactccttccggtattgactgtggcagtggacgtagcaccccttcttccgtcagtaccgttagtacgatctgcccaggtgacttgaaagttgctgctaagatggcccctaacattcctttggaaatggaacttccgggcgtgaagattgtacatgctcagtttaacactcctatgcagttgtactcagatgacaatattatggaaacacttcagggtcaggtttccacagctctaggggagacaccctccatgagtgaacccacagcttcagttccccctcagtcggacgtgtaccgaatgctgcacgacaatcgggatgaaccagctgctcctcgccagtcaggctccttcagggtcctgcaggagctggtgaacgacgggtctgatgaccgtcctgctggaactcgaagtgtgaggccggttactaaagtccatggcggggctggcggtgcccagaggatgccactctgtgacaagtgtggcagtggtattgtaggtgctgtggtcaaggcccgggataagtaccggcaccccgagtgctttgtgtgtgctgactgtaacctcaacctcaagcagaaaggttacttcttcgtggagggggagctgtattgtgagatgcacgcaagagcccgggcgaggcccccagaaggctacgacaccgtcactctgtaccccaaagcttaaattctttacagacgagaacactcattcacgcatgcgcacacacgaacaccggcggatgataaggaggacttcaagcaggaggagtgcgaaggtcacctcccaatcgaaagcgaggcttttagtcatttatcttactgtgtagtgagggaaagacatggggagcagaggcctgcctactgacaaaagtattatctgtgggttgtaattctttatctttggggacagcaatggtgacatttaaagcaataacgttgtaataccatgctctacggtttccatctgttacacgcccatccgatgcgtgaacacctggatatgtagggggggtccacttgtctttccttccaagttgcttttggtaattgtagtaacgccaaattacagctttgtactggaac

SEQ ID NO: 1127 - DNA, 622 bp, Rattus norvegicus
  Genbank Accession No. AA945750
actgcattttattcatttatgtattgtgtgtgggtgtaggtccgagtgcccatacagaggtcaaggaacatctcggaagaattggttctctcctcctgtgaattgaactcagatcatcacgcctagtggtaagttcttctacctgctgggccatctcggctggcacaagtaatcagcttctcaccaagagctaagaatatatatttcacttgtaatttttagtttaaaaatcttttgtttgagaatctcataggtgcacacaatacaatacattttcatttgtagtttttgaaaggaatttgcttctaagtacagtaaagtgtcttaaatgtgaatgcatattggcgaacttttatatgtatgtgtatgtctatatgcttgtgtgtgttcaagtgtgtgtagttgcatgtgtgtgtgtgcaggggtgcatgcaaaagtacgcaagcatgtgtacgagggtcagaggtgaggctctggtatttctcctcaggcattgtccactttcgttttctgaggcagggtctctcattgacctggaactcattaaaacagacgaggctggccagggatgcccaggaaaccgttttcatctccctgcccagtgctgggattacaagtgcat

SEQ ID NO: 1128 - DNA, 476 bp, Rattus norvegicus
  Genbank Accession No. AI236048
  misc_feature (1)..(476): n = a or c or g or t
gaggcgagaagtggctgctttattggcttcagatctcccaaagagccggccccctggatccagtgtgctagccatgtctacttcagctctgtataagttctggggcagcacacgcacgctcgcacgcacgcacgcagccactgtctggatagtctatggtcagtggcacttgggaaacaggacaactgttctcggctcctcgaaggtggcgatgaggatctgctggggtgggggtatgctgaggaggtcgcccatgtctgagggtgcacagggacctccttcctcctcttcccgggcctcgtacaacgtgctgatgtggagcagggggtgagtggcgtttcggctcaggatggtgagggggtcagccttgcccangctgctcggtgacagggaagcagcagcagaggccgtggggggtgagcacacatggaatgggcccccagacggcagggcagactctgtggggtatgggaatt

SEQ ID NO: 1129 - DNA, 415 bp, Rattus norvegicus
  Genbank Accession No. AI029174
tttttttttttttttatagtttatacaattcaaaatttatgtaaagtccatgatacttaagttattcttaaattgcacaatgctaaagacagcctataaaagtcaaacacaccactgcaaggtaatccaatgaaggttttttttaaatgcgtacaggaaaaaaaaatcaaatccccaatgacagtctcccatacagcttcctgtctgcacagaagctcagggcccctggctggagcagcaggggagttagtcccactccatgggatgggtggacttgtggaagagttttaagttccctttgttctccagtgtgtcttgtacaaaatattacatttttaaacatatttacagagtttgcacaaatagaaaatggttacaaattacaaccaggcttggcaagataatagcttcccct

SEQ ID NO: 1130 - DNA, 368 bp, Rattus norvegicus
  Genbank Accession No. AI180239
gacttagcagaggctctttattaggtgggacagttgaatgaagccagtgggggaggggatctgtgatagccgctgtaggaactggcaaggcctggagtccacctgacatggcaggaggcactggacctgcaggtagcacgcagcctctgggccggctgggaactgccacagccaggacagataggggctccagcatcactagagcagagccgggagaggccctcagaacccaaattctctgcaaacctgggtagacacccattagacactgagggttaaagagatctgactgagaagagagggacagtccctgtagtgtttcacagcactgctataaaacccaaggatgccacaggctgcctcgtgcc

SEQ ID NO: 1131 - DNA, 613 bp, Rattus norvegicus
  Genbank Accession No. AI179610
attagataatgccatttattatttcacacagaagttagagaccaaggttacaattattaaataccacccacccctcaaaagacagccctacttggttagaataaaaaaacaatcgatacaacaaaaaataccattacactggtagaactggggaaataacaaaaacaagacagaaacacaagacagaaaatctctgcacactgatatcaaagtggccatgacgctgggggaaagcagtcatggtcagtcaacatggacgccgactaccaagggcactgggctcagaacagccgcctctaccgaccacagttctggggctctgttgcaggatttggggctgctggtttccaagttcaggcccctggctgtgcttttggtgagggaaatgtgccaggcatctccttccattccagagagacaaaggaagacacaggaagggggcgaggaaccccaaaagctttcttagaggcccaagaaaagagagccaggcaagattctcccctgcagagagaaggctacatgagacagagttcacagcctctgggggccaacactgcatttacatggcataaattcccactgccacggtcgccaacaggaaactgagtgttga

SEQ ID NO: 1132 - DNA, 428 bp, Rattus norvegicus
  Genbank Accession No. AI639204
ttccttccttgaccaagttgtcattgagtagagcgttgttcaacttccatgtacatgtgggctttctttcgttaatgtcattattgaagaccagtcttagtgcatggtgatctgataggatgcatgagattatttctatcttcctgtatctgttgagacctattttgtgaccgattatatggtcaattttagagaaggtaccatgaggtgctgagaagaagttatatacttttgttttaggacagaatattccataaatatctgttaaatccatttggttcataaattctgagagtttctctatgtctctgattaatttctctttccatgatctgtccattgatgagagtggggtgttgaaatctcctactcttattgtttgaggtgcaatgtgtgctttgagctttatgaaggtttcttttatgaat

SEQ ID NO: 1133 - DNA, 668 bp, Rattus norvegicus
  Genbank Accession No. AI179422
ggttattgaatatgtattttttaactgaaaaaatcattcataaattaacatacagaaatgtacaaacacatgagtgaacaatgtaatgacaaggaccatttctgtgaaaagtgtttttaaaacatctttaggcttcagtgcaaaaatgtccccctggcacctttaaaacaaagagcaagctcagaacaaagacagtaatggtggctaagccagtggcgtcagtgcctcgtcgatggtatgcacagtcagtgtgtgctctgccgctctgaggaaggaactcgatgacaggagtccccattttagcaaaattaaagttttgcaaatcccccctccccaaagaaagcctgtgcggacagagaccttgcacacacagggcagtcagtcaagggcaggtcggcttaagggtcactcgtctgtagcatggagtaatttcagctgccaaagtacaccaaggtcacacttgattctcaatgtcattttctttaagcaatgacctaatgtgtggtccagtggtgtggctctgactgtgacatttcccactcggtatgtgactgggcggacaatgactgacagtgcccacaagagtccacactaataacaaacttggacatgattgcaagggaacataagtgacccgacttgagcagtaaaaagactttctttgtccc

SEQ ID NO: 1134 - DNA, 467 bp, Rattus norvegicus
  Genbank Accession No. AI179260
gaagcaaagacagcccacagggtgatatatgtatttctgtgtccattttacttttgctaagtaaagattatgatgtatcccttaacttttgcacaaatactgtttctatggaaataaaggagcaaaggaatttctaaatgctttatttgttggggacacaaacatttcttctcctctaagattcttcttgatagaaaacataagagcttggtaatgcatttgttaaagggacacgaagtgtctatgttggtacatagaggcaatactacactttcaaatacactggcaataaattaaggttgtagccgttgctgtattagagaaaatgaatgggttagtctcagcaacaaaaactagtctgaaaatagataagctagtgttatcaaagctggaaaaaatattaacttcagcccacactccactatacgtaagtgtgcgttgagtaatgtcagctatggaatgtcatg

SEQ ID NO: 1135 - DNA, 1215 bp, Rattus norvegicus
  Genbank Accession No. D12771
gaattccggcagtcctgtcctgcagtcgcctgcctcttcttttttgctttcaacatgacagatgccgctgtgtccttcgccaaggacttcttggctggtggagtggccgcggccatctccaagacggcggtagcacccatcgagcgggtcaagctgctgctgcaggtgcagcacgccagcaagcaaatcacggcagataagcaatacaagggcatcatagactgcgtggttcgtatccccaaggaacagggagtcctgtccttctggcgtggcaacctggccaatgtcatcagatacttccccacccaggctctcaactttgccttcaaagataaatacaagcagatctttttgggtggtgtggacaagaggacccagttttggcggtactttgcagggaacctggcatcaggtggtgctgctggggccacatccttgtgctttgtgtaccctcttgattttgcccgtacccgtctagcagctgatgtgggcaaagctggagctgaaagggaattcaaaggccttggtgactgcctggttaagatctacaaatctgatgggattaagggcctgtaccaaggctttaatgtgtcagtgcagggcattatcatctaccgtgctgcctacttcggtatctatgacactgcaaagggaatgctcccggatcccaagaatactcacatcttcatcagctggatgattgcacagtctgtcactgctgttgctggcctaacttcttatccttttgacacggttcgccgtcgtatgatgatgcagtctggacgcaaaggaactgatatcatgtatacaggcacgcttgactgctggcggaagatcgctcgagacgaaggaggcaaggcctttttcaagggtgcatggtccaacgttctcagaggcatgggtggtgcctttgtgcttgtcttgtatgatgaaatcaagaagtacacataattatgtcctaggtgttctccccgagaacaggcatgttgtataatagaccatattcttgaacattctggacagattctctgggcttgtctgttttatcaatggcaactatttaccagttgaaaagtggaagcaataatattcatctgaccagttttctcttaaagccatttccataatgacaataatgatgggactcaattatattttttatttcagtcactcctgataataaaaaattgaagaaataaaaatatcccggaattc

SEQ ID NO: 1136 - DNA, 401 bp, Rattus norvegicus
  Genbank Accession No. AA850688
gacttaggataaaaaagtcatgtgtcctgtcattgacttctgaggcatagttttcatatattttctctctttgaaacctactgactggtctgggcatggtgggaatgtgctagtagccacaggactatcactcatttctctttttccttcagtcacataagtcctttgtaacctgagtaggtttggccagaaatctgaaatcagcttgaatgaaggatattcccctccccaccccaaaacccaggaggctcatgggaatactttggcaagaaacgcaagttcagattggctgttaacatgttaacctgagagtcagaacttcaggttacaagcaggatggactaagtatttacaaaaagcagaatttgtggcctgaaagatcaggcaaatgtgtgtgttcc

SEQ ID NO: 1137 - DNA, 477 bp, Rattus norvegicus
  Genbank Accession No. AI176185
ttgctacatctccggaagaggtgaggactggagtccagatgtggatgctttcaagtccttgaggtccacagcctggtgtgtttcacgcacagataaggtcctccctaggtctacgggaacccctcgagggaagacttgtttcttctctctgtaatgcaccagctcagtcagtgccggctgccctgccttctctgactgctcacagggctagcagtgtgggcgagctcagtgagtcataggagggctcgttgctgctgctgccctttcggtgggcagctgcgcagctagggaaggagtcagcctcggggtaggtgaagacaaaggaagacgtataggtagtgcagctgggagtgcacgtgacaacgggagtgcacaggggctccagctctgtgaccatgggccccatccccagggaactgctgtgcagaggctcccagtctgctgcatagaaggaaccagacaggtccacatctggca

SEQ ID NO: 1138 - DNA, 575 bp, Rattus norvegicus
  Genbank Accession No. AI176509
gacaagtatgcagacatcatttatttggtccataagtacagtatatttgttgtttgagtttacaaaacatcaaatataaataacctgaaactgtaacaaatacacaaaaattggcttctttcacagacataccaggcagtacaaactgaaaatctgagtaaattaacattgttttacattaatatacagtgtcaggtaacgtttaaaaaacaagtttcaatgcatagcacttgacacttctgtgaatctttcaggtaagagtatgaaaatggttagatctaggctaaaaataactcttctctagccaaaaataaaggcataatatttatacccaggttgcagcgctcctaccccacagtgttttccactgggaaatgatagctaaggctatttacagggaaggcaacatgcacgcccgcattctttcagctcatcactggtccacccagctttgctcaaagggtcgcaaattctattcctacttcaacacagcaacagtctctaacagtctcagcaaatgaacgctttcacaggggcagaaccaccaaagccaccgcagcctgtgccctcgtgcc

SEQ ID NO: 1139 - DNA, 711 bp, Rattus norvegicus
  Genbank Accession No. AA892775
caaactttttttttatttttttttttttttttgcgttgaaaatcatttaatgagaattatactttttctctatcagattagatctgttctagtgattattgtctggtgttacaagctcatctgtctcagagttggttagtgtgcatgaagctacttaagaaagatatggacaagcacagctcactggtccccctgagcacctcacaagactgggaacatcctctcaagggttaaaacagacgggcatacgggctgagaatttattttgaaggcaggataaacaggccagctctaagaagatactgttttgaaagctcacacgtttcataagtttctgagttcaggcagtctcagttctcatccactgagtcctgggccctcaaaagccctccaggtccaccacagaggctgttctaactgggtgctgagcctatacaaagccctggcactcacacaactgccattccccaagatcaactcgtctcctgtaaatatgtgctgtttgtatccggcacagggctgatgaagatggatcccgatggagcctactgtgcattacttcctgatgtgcagagatgtgtgtggtgagactgtgcgggatgctgggagcagtgtgcagtgcgttgggagactgagaagtgaaagccctgttggtttgaggggaaagcaaggaaatgtgacctttcccatagctactcccacagtgagaaa

SEQ ID NO: 1140 - DNA, 512 bp, Rattus norvegicus
  Genbank Accession No. AI103410
cttgtacaaaacactttattatagagaagagttggcttatgggctcaaacatctagatctgggtgtctattctctttcctgttttgtctccagcactgggagctagggtccctcctcatctataagttatctctgtgaacagagggggtcttccccaacaccctgcagttccagaataagtctacaggctgaagtggtctgaccatacaagaaaagctctttacaaaaggttctgtggggcagaaaattccagaggccatcctgccagcagaactgggctgccagctcagtggtgggcagggctcactggcaggtcaaccatgtgtcacccaaagtctagccatagcagaatgaaagccgagctgtaccgatcactgggaacagtggggtgacaaagttgtcagtcacaaggtgcctttctgggtcatggcaaatgtgggtttggacttctggtccttaggccacaagagagccactgggcggtaagccaagcctggtgtgggggaaaggcc
